(19) United States
(12) Patent Application Publication
(10) Pub. No.: US 2003/0108890 A1
(43) Pub. Date: Jun. 12, 2003

(54) In silico screening for phenotype-associated expressed sequences

(76) Inventors: Anna Vjacheslavovna Baranova, Fairfax, VA (US); Andrey Vladimirovich Lobashev, Moscow (RU); Larisa Leonidovna Krukovskaya, St. Petersburg (RU); Nikolay Kazimirovich Yankovsky, Moscow (RU); Andrey Petrovich Kozlov, St. Petersburg (RU)

Correspondence Address: ROTHWELL, FIGG, ERNST & MANBECK, P.C., 1425 K STREET, N.W., SUITE 800, WASHINGTON, DC, 20005, US

(21) Appl. No.: 10/157,031

(22) Filed: May 30, 2002

Related U.S. Application Data
(60) Provisional application No. 60/293,999, filed on May 30, 2001.
(60) Provisional application No. 60/330,457, filed on Oct. 22, 2001.
(60) Provisional application No. 60/357,144, filed on Feb. 19, 2002.

(51) Int. Cl. C12Q 1/68; G06F 19/00; G01N 33/48; G01N 33/50

(52) U.S. Cl. 435/6; 702/20

(57) ABSTRACT

The present invention provides methods for determining whether a nucleic acid sequence is a marker for a phenotype or cell type of interest which comprises providing a database of expressed sequence tag sequences (EST's) from the species; placing said EST's in groups termed clusters based on homology of EST's within each cluster; determining for each cluster the total number of EST's within said cluster; ordering said clusters sequentially based on the number of EST's in each cluster; dividing said ordered clusters into subranges based on the number of EST's per cluster; determining for each cluster subrange obtained from step (e) the number EST's within said cluster which are expressed in said predetermined cell type of interest; calculating according to a normal distribution the number of clusters in each subrange expected to contain a predetermined threshold percentage of EST's expressed in said cell type of interest, wherein said threshold percentage is a percentage from about 10% to about 100%; determining the number of clusters in each subrange observed to contain said predetermined threshold percentage of EST's expressed in said predetermined cell type; and identifying subranges having an observed number of clusters that meet said predetermined threshold percentage greater than the number of clusters expected to meet said predetermined threshold percentage for the subrange according to normal distribution; wherein if the percentage of EST's expressed in said cell type of interest in a cluster identified is equal to or greater than said predetermined threshold percentage, the cluster contains a nucleic acid that is a marker for the cell type of interest.

[0001] The present application is related to, and claims the benefit of priority of, Provisional Application No. 60/293,999, filed May 30, 2001, No. 60/330,457, filed Oct. 22, 2001, and No. 60/357,144, filed Feb. 19, 2002, all of which are incorporated in their entirety by reference herein.

### FIELD OF THE INVENTION

[0002] The invention relates generally to the field of genetics and differential expression of genes of interest. More specifically, the invention relates to methods for detecting expression of nucleic acids or proteins associated with a particular phenotype by performing a differential global comparison of a group of Expressed Sequence Tags (EST's) expressed in a particular tissue or cell type with a larger group of available EST's for a plurality of cell types.

[0003] The publications and other materials used herein to illuminate the background of the invention or provide additional details respecting the practice are incorporated by reference.

### BACKGROUND OF THE INVENTION

[0004] Comparing patterns of gene expression in different cell lines and tissues has important applications for a variety of biological problems. Such information is useful, for example, in comparing mechanisms of differentiation, microbial pathogenesis or tumor malignancy. Typically, such information is obtained by detecting altered gene or protein expression patterns associated with a particular phenotype. Comparing patterns of expression is particularly important, for example, in determining pattern(s) of expression that lead to aberrant cell growth, especially in tumor formation and cancer. A number of experimental methods have been designed for the detection of phenotype or celltype associated gene expression. Most of them are based on time-consuming and expensive experimental protocols (e.g., numerous modifications of the differential display approach, cDNA microarrays, or Serial Analysis of Gene Expression).

[0005] EST's are an integral tool in the study of differential expression patterns. The total number of human ESTs in publicly available databases (>4×10⁶) exceeds by approximately two orders of magnitude the total number of different transcripts that can be deduced from the number of human genes (2.5-4×10⁴). Accordingly, there presently exists a need for computer-based procedures for the detection of EST expression profiles to replace traditional experimental protocols utilized in gene expression profiling.

[0006] UniGene is an experimental system for automatically partitioning GenBank sequences into a non-redundant set of gene-oriented EST clusters based on DNA sequence homology. Each UniGene cluster contains homologous or similar sequences that represent a unique “gene” or RNA transcript, as well as related information, such as the tissue type(s) in which expression of the transcript has been detected and the map location of the gene encoding the transcript. In addition to sequences of well-characterized genes, hundreds of thousands of novel EST's are also included in the UniGene partitioning system. Clustering is the process of finding subsets of sequences which belong together within a larger set. This is done by converting discrete similarity scores to boolean links between sequences using techniques well known in the art. That is, two sequences are considered linked if their similarity or homology exceeds a threshold. Sequence pairs which are sufficiently similar are linked together to form initial clusters. The set of ESTs is compared with the set of genes using the “megablast” algorithm (Zhang et al., J Comput Biol;7(1-2):203-14 (2000)) and sufficiently similar sequence pairs are added to a particular cluster. A detailed description of clustering performed in the UniGene system can be found at http//www.ncbi.nlm.nih.gov/UniGene.

[0007] Differentially expressed EST clusters may be useful as phenotypic markers and prognostic indicators and may be suitable targets for various therapeutic interventions. Prior art methods for the detection of phenotype or cell type of interest or expression patterns have included pairwise comparison of expression patterns in a the phenotype or cell type of interest and corresponding normal tissue in order to determine transcripts which are expressed either specifically or in higher quantities in the cell type of interest. As an example, such pairwise comparisons have been done for tumor-associated expression patterns.

[0008] The technique of computer based differential display (CDD) compares expression patterns in a particular tissue versus another tissue source. The comparison can be based on sequence databases available in the World Wide Web. This technique has been used to identify prostate-associated genes (Vasmatzis et al. Proc.Natl. Acad. Sci. USA 95, 300-304 (1998)) or ectopically expressed genes in particular tumor types in comparison to corresponding normal tissue (Schuerle et al. Cancer Res. 60, 40374043 (2000)).

[0009] There presently exists a need to develop computer based methods for comparing large numbers of EST's in a global fashion with all known phenotype-associated EST's, so that phenotype-associated patterns of gene expression can be culled from the massive number of such sequences available, without the need for an extensive number of microarray analyses or serial analyses of gene expression in a pairwise manner between a cell type of interest and another individual cell type.

### SUMMARY OF THE INVENTION

[0010] The present invention provides methods for the detection of nucleic acid markers associated with a cell type or phenotype of interest by performing a global comparison of a group of EST's known to be expressed in the cell type or phenotype of interest with all EST's expressed in normal tissue in order to identify EST's that are preferentially expressed in the cell or phenotype of interest. The methods comprise arranging both the EST's of interest from a particular species and a larger group of other EST's available for the species in clusters based on homology among the EST's. The methods further comprise arranging the clusters into distinct subranges based on the number of EST's in each cluster and, based on the percentage of EST's derived from the cell type of interest, calculating the number of clusters expected to contain a predetermined percentage of EST's from the cell type of interest. Subranges which contain more than the expected number of clusters containing at least or more than the predetermined percentage of EST's from the cell type are selected for further analysis. The present invention also presents a method for determining a computer based differential display (CDD) of cell or phenotype-associated genes. In one embodiment, the cell or phenotype associated markers are determined for a tumor cell. In a preferred embodiment, at least some of the discrete steps in the method are performed on a computer and comparisons are made between global expression patterns of EST's in a specific cell type or phenotype (such as, e.g, tumor) versus global expression patterns of EST's in all other tissue. Alternatively, the comparisons can be made between EST's expressed in a specific cell type and EST's expressed in normal tissue. The approach was inspired by the hypothesis that evolutionary selective pressures might provide conditions for expression of genes that are not expressed in normal tissue (Kozlov, Medical Hypotheses 46, 81-84 (1996)).

[0011] In one embodiment, the invention provides methods for the detection of phenotype or cell type-associated markers by global comparison of all phenotype or cell type-associated EST's with all known EST's to identify EST's that are preferentially expressed in cells expressing the particular phenotype. In a particularly preferred embodiment, the phenotype is tumor formation and the cell type is a tumor cell. Thus, in one embodiment, the invention provides a method for the detection of tumor markers by global comparison of all tumor associated EST's with all known EST's to identify EST's that are preferentially expressed in tumors.

[0012] In another embodiment, the invention provides a method for the detection of stress-related genes in a plant model relevant to agricultural plants. Thus, in another preferred embodiment, comparisons are made between global expression patterns of EST's in Arabidopsis thaliana grown in stress conditions (i.e., drought, cold, high salt concentration) versus global expression patterns of EST's in A. thaliana cultivated under normal conditions. Comparisons can also be made between mature plant cells and cells from roots or shoots.

[0013] Analysis of combined preparations of mRNAs from several tissues in saturation and experimental subtractive hybridization procedures indicate that tumors contain more diverse sets of mRNAs than any normal tissue. This observation led to the idea of subtracting all available normal EST's (instead of pairwise comparisons) from all available tumor and corresponding normal tissue. (Evtushenko et al. Mol.Biol. 23, 510-520 (1989).

[0014] In one embodiment, the invention provides a method for determining whether a nucleic acid sequence is a marker preferentially expressed in a phenotype or cell type of interest from a biological species. In a preferred embodiment, the invention is performed with the aid of statistical software analysis and one or more computers and comprises the following steps: (a) providing a database of expressed sequence tag sequences (EST's); (b) placing said EST's in groups termed clusters based on homology of EST's within each cluster; (c) determining for each cluster the total number of EST's within said cluster; (d) ordering said clusters sequentially based on the number of EST's in each cluster; (e) dividing said ordered clusters into subranges based on the number of EST's per cluster; (f) determining for each cluster subrange obtained from previous step (e) the number EST's within said cluster which are expressed in said predetermined cell type of interest; (g) calculating according to a normal distribution the number of clusters in each subrange expected to contain a predetermined threshold percentage of EST's expressed in said cell type of interest, wherein said threshold percentage is a percentage from about 10% to about 100%; (h) determining the number of clusters in each subrange observed to contain said predetermined threshold percentage of EST's expressed in said predetermined cell type; and (i) identifying subranges having an observed number of clusters that meet said predetermined threshold percentage greater than the number of clusters expected to meet said predetermined threshold for the subrange according to normal distribution; wherein if the percentage of EST's expressed in said cell type of interest in a cluster identified in (i) is equal to or greater than said predetermined threshold percentage, said cluster contains a nucleic acid marker preferentially expressed in the cell type of interest. In preferred embodiments, the clusters of the invention are derived from the UniGene database, which contains all sequences associated with a cluster. The clusters have unique “Hs.” Unigene cluster ID numbers to identify the cluster based on homology. Thus, once a cluster is identified as associated with a phenotype using the EST's from the cluster, the cluster-identifier can be used to identify all other sequences associated with the cluster such as full length mRNA's that are homologous to the EST's in the cluster. In this manner, a reference nucleic acid or polypeptide sequence for the cluster can be determined by reviewing the Unigen database. The methods of the present invention can be used with any database, as long as the database contains sequences that can be arranged in clusters based on homology.

[0015] In one embodiment, the invention provides a method for determining whether a nucleic acid is a marker in humans preferentially expressed in a tumor cell. In this embodiment, EST's from a database containing human EST's which contain a description of the source of the EST's retrieved from the cluster description are provided and arranged in individual clusters based on homology; for each cluster the total number of EST's within said cluster is determined; said clusters are ordered sequentially based on the number of EST's in each cluster; said ordered clusters are divided into subranges based on the number of EST's per cluster; the number of EST's within said cluster which are expressed in tumors is determined for each cluster subrange; there is then calculated according to a normal distribution the number of clusters in each subrange expected to contain a predetermined threshold percentage of EST's expressed in tumors, wherein said threshold percentage is a percentage from about 90% to about 100%; the number of clusters is determined in each subrange observed to contain said predetermined threshold percentage of EST's expressed in tumors; and subranges having an observed number of clusters that meet said predetermined threshold percentage greater than the number of clusters expected to meet said predetermined threshold for the subrange according to normal distribution are identified; wherein if the percentage of EST's expressed in said cell type of interest in a cluster from a subrange identified as having a greater than expected number of such clusters is equal to or greater than said predetermined threshold percentage, said cluster contains a nucleic acid marker preferentially expressed in tumors.

[0016] In another embodiment, the invention provides a method for detecting EST expression in stress induced A. thaliana which comprises the following steps: (a) for all individual A. thaliana EST clusters, the number of ESTs is retrieved from the cluster description; (b) next, the number of ESTs from all stress-induced cDNA libraries present in each cluster description is counted; (c) there is then determined for each cluster the total number of EST's within said cluster; (d) said clusters are ordered sequentially based on the number of EST's in each cluster; (e) said ordered clusters are then divided into subranges based on the number of EST's per cluster; (f) it is then determined for each cluster subrange obtained from previous step (e) the number of EST's within said cluster which are expressed in Arabidopsis cells presented with stress conditions; (g) there is then calculated according to a normal distribution the number of clusters in each subrange expected to contain a predetermined threshold percentage of EST's expressed in said cell type of interest, wherein said threshold percentage is a percentage from about 10% to about 100%; (h) the number of clusters in each subrange observed to contain said predetermined threshold percentage of EST's expressed in said predetermined cell type is determined; and (i) subranges having an observed number of clusters that meet said predetermined threshold percentage greater than the number of clusters expected to meet said predetermined threshold for the subrange according to normal distribution are identified; wherein if the percentage of EST's expressed in stress-induced plants in a cluster identified in (i) is equal to or greater than said predetermined threshold percentage, said cluster contains a nucleic acid marker preferentially expressed in the stress-induced plants.

[0017] The invention thus provides a method for correlating EST expression with a phenotype and in one embodiment requires correlation between a central unit or units containing EST sequence information. In a preferred embodiment, at least some of the EST sequence information analysis is implemented on a conventional personal computer, with the correlator being embodied in a software program. Because the correlator is embodied in software, it may be transported among various computers, which may be used separately or together to perform some or all of the various operations discussed herein.

[0018] In another embodiment, the invention provides a method for identifying a tumor cell which comprises detecting the expression of a tumor-associated marker of the present invention. As discussed in greater detail infra, the tumor-associated marker can be a nucleic acid or a polypeptide or fragments thereof.

[0019] In another embodiment, the invention provides a method for detecting a tumor cell by detecting the expression of nucleic acid sequences which are tumor-associated and can be used as diagnostic tools for the detection of tumor tissue. The tumor-associated nucleic acids are detected using the methods for determining whether a nucleic acid sequence is a marker for tumors as described herein. The sequences may be utilized for both in vitro and in vivo screening for the presence of a tumor cell. In one embodiment, the invention provides a method for detecting the expression of a tumor-associated nucleic acid sequence wherein the sequence is selected from the group consisting of SEQ ID NO:'s 9, 11, 13, 15, 17, 19, 23, 25, 27, 29, 33, 35, 37, 39, 41, 45, 47, 55, 57, 59, 61, 63, 65, 67, 69, 73, 75, 77, 79, 81, 83, 89, 91, 93, 95, 97, 99, 101, 103, 107, 109, 111, 113, 115, 117, 119, 121, 123, 127, 129, 131, 133, 135, 137, 138, 140, 142, 144, 146, 148, 150, 153, 155, 157, 158, 160, 162, 164, 166, 168, 172, 174, 176, 178, 180, 182, 184, 186, 189, 191, 193, 195, 197, 199, 201, 203, 205, 207, 209, 211, 213, 215, 217, 219, 221, 223, 225, 227, 229, 230, 232, 234, 236, 238, 240, 242, 244, 246, 248, 250, 252, 254, 256, 258, 260, 262, 264, 266, 268, 270, 272, 274, 276, 278, 280, 282, 284, 286, 288, 290, 292, 294, 296, 298, 300, 302, 304, 306, 308, 310, 312, 314, 316, 318, 320, 322, 324, 326, 328, 330, 332, 334, 336, 338, 340, 342, 344, 346, 348, 350, 352, 354, 356, 358, 360, 362, 364, 366, 368, 370, 372, 374, 376, 378, 380, 382, 384, 386, 388, 390, 392, 394, 396, 398, 400, 402, 404, 406, 408, 410, 412, and 414. In a particularly preferred embodiment, the nucleic acid sequence is selected from the group consisting of SEQ ID NO:'s 73, 184, 186 and 242.

[0020] In another embodiment, the invention provides a method for detecting a tumor cell by detecting the expression of an antigen of a tumor-associated polypeptide which comprises screening tissue or cells with antibodies specific for an antigen expressed by a tumor associated polypeptide, wherein the polypeptide is selected from the group consisting of SEQ ID NO:'s 10, 12, 14, 16, 20, 24, 46, 28, 30, 34, 36, 38, 40, 42, 44, 46, 48, 50, 52, 54, 56, 58, 60, 62, 64, 66, 68, 70, 71, 72, 74, 76, 78, 80, 82, 84, 86, 88, 90, 92, 94, 96, 98, 100, 102, 104, 106, 108, 110, 112, 114, 116, 118, 120, 124, 126, 128, 130, 132, 134, 136, 139, 141, 143, 145, 147, 149, 151, 152, 154, 156, 159, 161, 163, 165, 167, 169, 171, 173, 175, 177, 179, 181, 183, 185, 187, 188, 190, 192, 194, 196, 198, 200, 202, 204, 206, 208, 210, 212, 214, 216, 218, 220, 222, 224, 226, 228, 231, 233, 235, 237, 239, 241, 243, 247, 249, 251, 253, 255, 257, 259, 261, 263, 265, 267, 269, 271, 273, 275, 277, 279, 281, 283, 285, 287, 289, 291, 293, 295, 297, 299, 301, 303, 305, 307, 309, 311, 313, 315, 317, 319, 321, 323, 325, 327, 329, 331, 333, 335, 337, 339, 341, 343, 345, 347, 349, 351, 353, 355, 357, 359, 361, 363, 365, 367, 369, 371, 373, 375, 379, 381, 383, 385, 387, 389, 391, 393, 397, 399, 401, 403, 405, 407, 409, 411, 413 and 415. In a preferred embodiment, the invention provides a method for detecting an antigen expressed by a tumor-associated polypeptide selected from the group consisting of SEQ ID NO:'s 74, 185, 187, 188 and 243.

[0021] In another embodiment, the invention provides a method for regulating the growth of a tumor cell which comprises regulating the expression of a nucleic acid selected from the group consisting of SEQ ID NO:'s 9, 11, 13, 15, 17, 19, 23, 25, 27, 29, 33, 35, 37, 39, 41, 45, 47, 55, 57, 59, 61, 63, 65, 67, 69, 73, 75, 77, 79, 81, 83, 89, 91, 93, 95, 97, 99, 101, 103, 107, 109, 111, 113, 115, 117, 119, 121, 123, 127, 129, 131, 133, 135, 137, 138, 140, 142, 144, 146, 148, 150, 153, 155, 157, 158, 160, 162, 164, 166, 168, 172, 174, 176, 178, 180, 182, 184, 186, 189, 191, 193, 195, 197, 199, 201, 203, 205, 207, 209, 211, 213, 215, 217, 219, 221, 223, 225, 227, 229, 230, 232, 234, 236, 238, 240, 242, 244, 246, 248, 250, 252, 254, 256, 258, 260, 262, 264, 266, 268, 270, 272, 274, 276, 278, 280, 282, 284, 286, 288, 290, 292, 294, 296, 298, 300, 302, 304, 306, 308, 310, 312, 314, 316, 318, 320, 322, 324, 326, 328, 330, 332, 334, 336, 338, 340, 342, 344, 346, 348, 350, 352, 354, 356, 358, 360, 362, 364, 366, 368, 370, 372, 374, 376, 378, 380, 382, 384, 386, 388, 390, 392, 394, 396, 398, 400, 402, 404, 406, 408, 410, 412 and 414. In a particularly preferred embodiment, the nucleic acid sequence is selected from the group consisting of SEQ ID NO:'s 73, 184, 186 and 242.

[0022] In another embodiment, the invention provides a method for regulating the growth of a tumor cell which comprises regulating the expression of a polypeptide selected from the group consisting of SEQ ID NO:'s 10, 12, 14, 16, 20, 24, 46, 28, 30, 34, 36, 38, 40, 42, 44, 46, 48, 50, 52, 54, 56, 58, 60, 62, 64, 66, 68, 70, 71, 72, 74, 76, 78, 80, 82, 84, 86, 88, 90, 92, 94, 96, 98, 100, 102, 104, 106, 108, 110, 112, 114, 116, 118, 120, 124, 126, 128, 130, 132, 134, 136, 139, 141, 143, 145, 147, 149, 151, 152, 154, 156, 159, 161, 163, 165, 167, 169, 171, 173, 175, 177, 179, 181, 183, 185, 187, 188, 190, 192, 194, 196, 198, 200, 202, 204, 206, 208, 210, 212, 214, 216, 218, 220, 222, 224, 226, 228, 231, 233, 235, 237, 239, 241, 243, 247, 249, 251, 253, 255, 257, 259, 261, 263, 265, 267, 269, 271, 273, 275, 277, 279, 281, 283, 285, 287, 289, 291, 293, 295, 297, 299, 301, 303, 305, 307, 309, 311, 313, 315, 317, 319, 321, 323, 325, 327, 329, 331, 333, 335, 337, 339, 341, 343, 345, 347, 349, 351, 353, 355, 357, 359, 361, 363, 365, 367, 369, 371, 373, 375, 379, 381, 383, 385, 387, 389, 391, 393, 397, 399, 401, 403, 405, 407, 409, 411, 413 and 415. In a preferred embodiment, the invention provides a method for detecting an antigen expressed by a tumor-associated polypeptide selected from the group consisting of SEQ ID NO:'s 74, 184, 185, 187, 188 and 243.

[0023] In another embodiment, the invention provides a method for vaccinating an animal to protect the animal from developing a tumor which comprises administering to the animal an immunogen comprising a polypeptide encoded by a nucleic acid selected from the group consisting of SEQ ID NO:'s 10, 12, 14, 16, 20, 24, 46, 28, 30, 34, 36, 38, 40, 42, 44, 46, 48, 50, 52, 54, 56, 58, 60, 62, 64, 66, 68, 70, 71, 72, 74, 76, 78, 80, 82, 84, 86, 88, 90, 92, 94, 96, 98, 100, 102, 104, 106, 108, 110, 112, 114, 116, 118, 120, 124, 126, 128, 130, 132, 134, 136, 139, 141, 143, 145, 147, 149, 151, 152, 154, 156, 159, 161, 163, 165, 167, 169, 171, 173, 175, 177, 179, 181, 183, 185, 187, 188, 190, 192, 194, 196, 198, 200, 202, 204, 206, 208, 210, 212, 214, 216, 218, 220, 222, 224, 226, 228, 231, 233, 235, 237, 239, 241, 243, 247, 249, 251, 253, 255, 257, 259, 261, 263, 265, 267, 269, 271, 273, 275, 277, 279, 281, 283, 285, 287, 289, 291, 293, 295, 297, 299, 301, 303, 305, 307, 309, 311, 313, 315, 317, 319, 321, 323, 325, 327, 329, 331, 333, 335, 337, 339, 341, 343, 345, 347, 349, 351, 353, 355, 357, 359, 361, 363, 365, 367, 369, 371, 373, 375, 379, 381, 383, 385, 387, 389, 391, 393, 397, 399, 401, 403, 405, 407, 409, 411, 413 and 415. In a preferred embodiment, the animal is a human and the immunogen comprises a polypeptide encoded by SEQ ID NO:'s 74, 185, 187, 188 and 243.

### DETAILED DESCRIPTION OF THE INVENTION

[0024] In one embodiment, the methods of the present invention can be used to classify data from original dbEST and UNIGENE databases in a table form (Baranova et al., FEBS Letters, 508, 143-148 (2001)). The HSAnalyst program is one type of software program that can be used to assemble the EST sequences and clusters using the methods of the present invention. This program is available at (http//pcn197.vigg.ru/programs/HSAnalyst.exe). In one preferred embodiment, the methods of the invention comprise the compiling of a supplemental database which contains only those sets of EST's that can specifically be associated with expression in either a particular abnormal (e.g., tumor)or normal physiological condition or tissue type. In one embodiment, the supplemental database includes EST entries from all human cDNA libraries that can specifically be classified as <<tumor>> or <<normal>> by tissue source. The supplemental database utilized in the demonstrative examples of the present invention contains a carefully checked description of each included library, cross-referenced from different data sources such as dbEST, UNIGENE and CGAP web-sites, which are available at the National Institutes of Health web site (www.ncbi.nlm.nih.gov), TIGR (www.tigr.org) and Stratagene (www.stratagene.com). The supplemental database thus contains a classification of all cDNA libraries as either tumor or normal. Approximately 4000 entries in the supplemental database describing cDNA sources were classified according to their origin from tumor or normal tissues (cells). In checking the libraries, those obtained from “premalignant”, “non-cancerous pathology” and “immortalized cells” were not included in the supplemental database. In other embodiments, one or more databases can be utilized in the methods of the invention without modifying in a supplemental database. In the case of the databases used in the demonstrative examples presented herein, some of the libraries were considered undefined due to lack of information or ambiguity of information.

[0025] EST pre-classification in the supplemental databases for other possible tasks not described herein can be performed by users themselves

[0026] HSAnalyst software was able to arrange EST data in the supplemental database according to any given parameter, e.g. tissue type or the number of ESTs contained in a cluster. As will readily be appreciated by persons of ordinary skill in the art, classification of ESTs according to tissue types requires verification of available database information on expression patterns and is the most time-consuming stage. Depending on the type of tissue being analyzed for global expression patterns, a specific database may contain and compare only sequences that are conclusively known to be expressed in a given cell type or physiological state. Classification of the data can be performed by many variations of software capable of handling large groups of data from the UniGene database without deviating from the scope of the present invention.

[0027] In one embodiment, the present invention provides a method for the detection of tumor markers wherein the CDD approach is utilized to search various publicly available databases containing human EST's. This gene-hunting procedure was inspired by the hypothesis that tumors may provide conditions for the expression of some transcribed units that are not expressed in any normal tissues. Instead of pairwise comparison of each tumor and corresponding normal tissue, a differential display of all available tumor libraries against all available normal libraries was performed.

[0028] A particular feature of the methods of the present invention includes subtracting all available clusters containing more than 10% of normal-derived ESTS from a whole set of the UniGene clusters to identify clusters associated with a particular phenotype, instead of pairwise comparisons of each tumor and corresponding normal tissue.

[0029] EST's present a particularly useful set of sequence data to analyze with the methods of the present invention. GenBank included 3,900,480 human ESTs as of Nov. 16, 2001. These sequences and the methods of the present invention were used to generate Table 1 discussed infra. UniGene includes all human ESTs clustered by homology. It should be noted that as available sequence data on EST's continues to grow, these numbers correspondingly change. The methods of the present invention will be equally applicable, however, to the evolving database resources which continue to become available for sequence analysis.

[0030] Most EST's can be traced to a certain tissue source, including tumor and normal ones. In a particularly preferred embodiment, the comparison of tumor and normal libraries is performed on a supplemental database referred to herein as “LibraryRegistry”, which comprises a supplemental database that contains only those EST's that clearly are defined as originally detected in normal or tumor tissue samples, as discussed above. It can readily be appreciated by persons of ordinary skill in the art that similar methods can be employed to “customize” a database to include only sequences known to be associated with a particular phenotype or cell type and a defined set of “normal” sources which provide sequences that can be distinguished from the cell or phenotype of interest. Just as the present invention provides tumor-associated EST's and compares these to other human EST's, an example is also provided which compares EST's reported from stress-induced Arabidopsis and EST's from Arabidopsis that are not from plants exposed to the stress conditions.

[0031] A preferred embodiment of the invention utilizes a method of sequence comparison to determine tumor-associated EST's. This method is demonstrated on tumor-specific sequences but as noted is applicable to any well-described database which provides information on the origin of nucleic acid sequences contained therein. In the first step, a database of clustered EST sequences containing a description of the source for each of the sequences is selected for analysis. In the second step, for each cluster the number of its ESTs is retrieved from the cluster description. Next, the number of ESTs from the “tumor” cDNA libraries is counted. The whole range of possible EST numbers is dissected into sub ranges. The arrangement of sub ranges can be performed exponentially (e.g., sub ranges with exponents 1-2, 34, 5-8,9-16) or linearly (sub ranges with factors 1-10, 11-20, 21-30). Simultaneously, the tumor ESTs/all ESTs percentage is calculated for each cluster and those clusters which exceed a user-defined bottom threshold value for the percentage of tumor ESTs/all ESTs are listed in the output file as tumor specific clusters.

[0032] The subranges can be arranged exponentially (e.g., sub ranges with exponents 1-2,3-4, 5-8,9-16) or linearly (sub ranges e.g. with factors 1-10, 11-20, 21-30). Classification of subranges into linear or logarithmic format provides two complementary ways for statistical estimation of a threshold level for determining whether a cluster is associated with a particular phenotype. Using the methods of the present invention, arrangement of subranges produced successful detection of tumor-associated markers whether subranges were arranged linearly as in Table 1 or logarithmically. Program output is designed to separate information about each set of clusters of the same size. In general it is possible to choose some intervals within the whole range of cluster sizes (cluster “size” is the number of EST's in a cluster). For example, if one needs the detailed picture of tumor clusters distribution it may be useful to choose narrow intervals, even assigning a cluster to as little as 1 EST sequence. For each interval the following values are calculated: total number of ESTs contained in clusters of the size within the interval N_{EST}, total number of these clusters N_{clust} and the number of tumor related clusters Nₜᵤₘ within this interval. Tumor related clusters that have relative content of tumor tissue-derived ESTs over the threshold denoted as <<t>> given by user (usually from 90% to 100%). Also, the theoretically expected number of tumor clusters within this interval is calculated. To let a computer program do this, the user must input the expected contents of tumor-related ESTs in the whole database. Given the N_{EST} and N_{clust} for the interval it is assumed that tumor cluster distribution is binomial so the expected number of tumor clusters is Nₜᵤₘ=N_{clust}*ΣCₘp^{m}(1−p)^{n-m} where p is mean tumor ESTs content in database (declared by user). The sum in the brackets is calculated for each m: n*t<m<n, where n varies between the interval edges and represents the hypothetical cluster size. The 90-100% threshold range described above for cell type-associated clusters in humans is for the case of human tumor-associated EST's but this number can vary depending on the difference between the expected number of clusters at a given t for a cluster size versus the observed number of clusters at a given t for the cluster size.

[0033] In an exemplary analysis using the methods of the present invention, the database LibraryRegistry was analyzed. This library provided a database of EST's from human normal and tumor sources. The EST's were placed in clusters based on homology; for each cluster the total number of EST's within the cluster was determined, the clusters were then ordered sequentially based on the number of EST's in each cluster and divided into subranges linearly based on the number of EST's per cluster as shown in Table 1. For each cluster subrange obtained the number EST's within said cluster expressed in tumor cells was determined. Next, based on a normal distribution, the number of clusters in each subrange expected to contain a predetermined threshold percentage of EST's expressed in tumor cells was calculated, wherein the threshold percentage was calculated at 90% and 100%. The number of clusters in each subrange observed to contain 90% or 100% tumor-specific EST's was determined. Next, subranges having an observed number of clusters that meet said predetermined threshold percentage five times greater than the number of clusters expected to meet said predetermined threshold for the subrange according to normal distribution were noted. Clusters in the subranges between 17 and 2048 were determined to contain 5 times or greater the number of expected clusters having 90% or more tumor-derived EST's in the cluster subrange were identified. These clusters were than associated with the corresponding Hs. Identifying number from the Unigene database to determine the nucleic acid sequences which were tumor-associated sequences.

[0034] To be sure that what was found was a “true” tumor-associated cluster not generated by chance among the total number of EST clusters classified with the methods of the present invention, the theoretical number of “tumor” clusters for every sub range is calculated. This is done utilizing an underlying model of a unimodal binomial distribution with the mean value of “tumor/all” percentage that can be defined by the user (0 to 100%). This binomial method is used to determine the expected number of tumor/all for predetermined thresholds for each cluster size based on the proportion of EST's from tumor cells in the database. In the example described in Table 1, the subranges which were analyzed for 90% or more tumor derived EST's were subranges that contained at least five times more such clusters than expected for the cluster size. This ratio of observed to expected has been found by the inventors to be reliable for determining phenotype or cell type associated clusters utilizing databases from Arabidopsis, human and mouse. It will readily be appreciated by persons of ordinary skill in the art that other ratios of observed/expected clusters for a predetermined threshold will also be useful. As little as 3.5 times the number of observed/expected clusters equal to or greater than the threshold range are also contemplated. Clusters between 3.5 and 5 times the number of expected clusters may also identify useful subranges displaying the predetermined threshold percentage of sequences for a cluster. Alternatively, an observed number of clusters for subrange that is at least one standard deviation greater than the number of clusters expected for a subrange may also be used to identify useful subranges displaying the predetermined threshold percentage of sequences for a cluster.

[0035] Referring now to Table I, the expected numbers of tumor-specific clusters that exceeded threshold values were calculated for a UniGene database of human EST's that was available on Nov. 6, 2001. A comparison between the expected and observed tumor-derived EST's demonstrated that tumor-related clusters were not accidental but represented a natural phenomenon. In this example, user-derived threshold values for the percentage of tumor-derived EST's to all EST's were at least 90% tumor-derived EST's per cluster and 100% tumor-derived EST's per cluster. When at least 90% of the EST's in a cluster are tumor derived, the cluster is referred to as tumor-associated. Each cluster was identified with a representative nucleic acid sequence based on the Hs. number for the sequence and the representative longest nucleotide sequence or defined mRNA sequence associated with the cluster.

[0036] Referring now to Table II, there are shown the results of tumor-related clusters detected with the methods of the present invention on a Unigene database that was assembled May 3, 2002. Except for the methods otherwise noted, the methods used to determine markers for tumors were as described for Table II. All of the tumor associated clusters in Table II had a number of EST's per cluster of 10 or more, which was found to be a significant number of EST's that would be tumor-associated using the methods described herein for identifying subranges having an observed number of clusters that was five times more than the expected number of clusters that met a predetermined threshold of 90% or more tumor derived sequences. Among the 196 tumor related clusters detected, 93 are non-coding and 103 encode at least one polypeptide sequence. Among clusters encoding a polypeptide, six correspond to known genes previously described as tumor markers/antigens, as indicated in Table 2.

[0037] Differentially expressed EST clusters are useful as markers for a physiological state or phenotype and prognostic indicators and may be suitable targets for various therapeutic interventions. Therapeutic interventions can include use of various gene therapy techniques to regulate the expression of the sequences, target-associated antibodies to inhibit growth of cells expressing phenotype associated marker polypeptides, and use of marker polypeptides as immunogens to vaccinate an animal against cells expressing the marker.

[0038] Useful diagnostic techniques include, but are not limited to fluorescent in situ hybridization (FISH), direct DNA sequencing, PFGE analysis, Southern blot analysis, single stranded conformation analysis (SSCA), RNase protection assay, allele-specific oligonucleotide (ASO), dot blot analysis and PCR-SSCP, as discussed in detail further below. Also useful is the recently developed technique of DNA microchip technology.

[0039] “Antibodies.” The present invention also provides polyclonal and/or monoclonal antibodies and fragments thereof, and immunologic binding equivalents thereof, which are capable of specifically binding to the tumor-associated polypeptides and fragments thereof or to polynucleotide sequences from the tumor-associated region, particularly from the tumor-associated locus or a portion thereof. The term “antibody” is used both to refer to a homogeneous molecular entity, or a mixture such as a serum product made up of a plurality of different molecular entities. Antibodies to the tumor-associated markers will be useful in assays as well as pharmaceuticals.

[0040] As used herein, the term “computer” is meant to refer to at least one computer but can also include more than one computer connected by any means known in the art of computer science. Furthermore, the term is also meant to include a computer interacting with a remote computer or other server which provides access to a plurality of databases via the world wide web. In one embodiment, the analysis of EST clusters is performed on software on a computer, while the information imported to the computer for correlation is obtained from contact with the world wide web.

[0041] Alteration of mRNA expression for the tumor markers of the present invention can be detected by any techniques known in the art. These include Northern blot analysis, PCR amplification and RNase protection. Alteration of expression of tumor-associated genes can also be detected by screening for alteration of the expression of the protein encoded by a tumor-associated gene. For example, monoclonal antibodies immunoreactive with a marker polypeptide can be used to screen a tissue using methods known in the art. These include Western blots, immunohistochemical assays and ELISA assays. Functional assays, such as protein binding determinations, can be used and assays biochemical function of a tumor-associated marker can be employed.

[0042] Genes or gene products can also be detected in human body samples, such as serum, stool, urine and sputum and isolated tumor tissue. The same techniques discussed above for detection of genes or gene products in tissues can be applied to other body samples. Cancer cells are sloughed off from tumors and appear in such body samples. In addition, the gene product itself may be secreted into the extracellular space and found in these body samples even in the absence of cancer cells. By screening such body samples, a simple early diagnosis can be achieved for many types of cancers. In addition, the progress of chemotherapy or radiotherapy can be monitored more easily by testing such body samples for genes or gene products. The diagnostic methods of the present invention is useful for clinicians, so they can decide upon an appropriate course of treatment.

[0043] Pairs of single-stranded DNA primers can be annealed to sequences within or surrounding a tumor-associated gene in order to prime amplifying DNA synthesis of the gene itself. A complete set of these primers allows synthesis of all of the nucleotides of the gene coding sequences, i.e., the exons. The set of primers preferably allows synthesis of both intron and exon sequences. The primers themselves can be synthesized using techniques which are well known in the art. Generally, the primers can be made using oligonucleotide synthesizing machines which are commercially available. Given the sequences of the tumor associated genes of the invention, design of particular primers is well within the skill of the art.

[0044] The nucleic acid probes provided by the present invention are useful for a number of purposes. They can be used as probes to detect PCR amplification products derived from the mRNA of the gene or to detect actual mRNA transcripts directly in tumors or other cells being analyzed for expression of tumor-associated markers.

[0045] “Probes”. Polynucleotide probes form a stable hybrid with a of the target sequence, under highly stringent to moderately stringent hybridization and wash conditions. If it is expected that the probes will be perfectly complementary to the target sequence, high stringency conditions will be used. Hybridization stringency may be lessened if some mismatching is expected, for example, if variants are expected with the result that the probe will not be completely complementary. Conditions are chosen which rule out nonspecific/adventitious bindings, that is, which minimize noise. In general, hybridizations conditions will be stringent conditions.

[0046] Probes for the tumor-associated markers may be derived from the sequences of the region or its cDNAs. The probes may be of any suitable length, which span all or a portion of the marker, and which allow specific hybridization to the transcripts expressed from the marker. If the target sequence contains a sequence identical to that of the probe, the probes may be short, e.g., in the range of about 8-30 base pairs, since the hybrid will be relatively stable under even highly stringent conditions. If some degree of mismatch is expected with the probe, i.e., if it is suspected that the probe will hybridize to a variant region, a longer probe may be employed which hybridizes to the target sequence with the requisite specificity.

[0047] The probes may include an isolated polynucleotide attached to a label or reporter molecule and may be used to isolate other polynucleotide sequences, having sequence similarity by standard methods. Other similar polynucleotides may be selected by using homologous polynucleotides. Alternatively, polynucleotides encoding these or similar polypeptides may be synthesized or selected by use of the redundancy in the genetic code. Various codon substitutions may be introduced, e.g., by silent changes (thereby producing various restriction sites) or to optimize expression for a particular system.

[0048] Probes comprising synthetic oligonucleotides or other polynucleotides of the present invention may be derived from naturally occurring or recombinant single- or double-stranded polynucleotides, or be chemically synthesized. Probes may also be labeled by nick translation, Klenow fill-in reaction, or other methods known in the art.

[0049] Portions of the polynucleotide sequence having at least about eight nucleotides, usually at least about 15 nucleotides, and fewer than about 6 kb, usually fewer than about 1.0 kb, from a polynucleotide sequence encoding the tumor associated markers of the invention are preferred as probes. Thus, this definition includes probes of 8, 12, 15, 20, 25, 40, 60, 80, 100, 200, 300, 400 or 500 nucleotides or probes having any number of nucleotides within these ranges of values (e.g., 9, 10, 11, 16, 23, 30, 38, 50, 72, 121, etc., nucleotides), or probes having more than 500 nucleotides. The probes may also be used to determine whether mRNA encoding a tumor-associated marker is present in a cell or tissue. The present invention contemplates the use of probes having at least 8 nucleotides derived from a tumor-associated marker of the invention and any combination of these sequences as described in further detail below, its complement or functionally equivalent nucleic acid sequences.

[0050] Similar considerations and nucleotide lengths are also applicable to primers which may be used for the amplification of all or part of the tumor-associated markers of the invention. Thus, a definition for primers includes primers of 8, 12, 15, 20, 25, 40, 60, 80, 100, 200, 300, 400, 500 nucleotides, or primers having any number of nucleotides within these ranges of values (e.g., 9, 10, 11, 16, 23, 30, 38, 50, 72, 121, etc. nucleotides), or primers having more than 500 nucleotides, or any number of nucleotides between 500 and 9000. The primers may also be used to determine whether mRNA encoding a tumor-associated marker is present in a cell or tissue.

[0051] Nucleic acid hybridization will be affected by such conditions as salt concentration, temperature, or organic solvents, in addition to the base composition, length of the complementary strands, and the number of nucleotide base mismatches between the hybridizing nucleic acids, as will be readily appreciated by those skilled in the art. Stringent temperature conditions will generally include temperatures in excess of 30° C., typically in excess of 37° C., and preferably in excess of 45° C. Stringent salt conditions will ordinarily be less than 1000 mM, typically less than 500 mM, and preferably less than 200 mM. However, the combination of parameters is much more important than the measure of any single parameter.

[0052] Probe sequences may also hybridize specifically to duplex DNA under certain conditions to form triplex or other higher order DNA complexes. The preparation of such probes and suitable hybridization conditions are well known in the art.

[0053] Methods of Use: Nucleic Acid Diagnosis and Diagnostic Kits

[0054] In order to detect the presence of neoplasia, the progression toward malignancy of a precursor lesion, or as a prognostic indicator, a biological sample of the lesion is prepared and analyzed for the presence or absence of the expression of a tumor-associated marker. Results of these tests and interpretive information are returned to the health care provider for communication to the tested individual. Such diagnoses may be performed by diagnostic laboratories, or, alternatively, diagnostic kits are manufactured and sold to health care providers or to private individuals for self-diagnosis.

[0055] Initially, the screening method may involve amplification of the relevant sequences. In another preferred embodiment of the invention, the screening method involves a non-PCR based strategy. Both PCR and non-PCR based screening strategies can detect target sequences with a high level of sensitivity.

[0056] The most popular method used today is target amplification. Here, the target nucleic acid sequence is amplified with polymerases. One particularly preferred method using polymerase-driven amplification is the polymerase chain reaction (PCR). The polymerase chain reaction and other polymerase-driven amplification assays can achieve over a million-fold increase in copy number through the use of polymerase-driven amplification cycles. Once amplified, the resulting nucleic acid can be sequenced or used as a substrate for DNA probes.

[0057] When the probes are used to detect the presence of the target sequences, the biological sample to be analyzed, such as blood or serum, may be treated, if desired, to extract the nucleic acids. The sample nucleic acid may be prepared in various ways to facilitate detection of the target sequence; e.g. denaturation, restriction digestion, electrophoresis or dot blotting. The targeted region of the analyte nucleic acid usually must be at least partially single-stranded to form hybrids with the targeting sequence of the probe. If the sequence is naturally single-stranded, denaturation will not be required. However, if the sequence is double-stranded, the sequence will probably need to be denatured. Denaturation can be carried out by various techniques known in the art.

[0058] Analyte nucleic acid and probe are incubated under conditions which promote stable hybrid formation of the target sequence in the probe with the putative targeted sequence in the analyte. The region of the probes which is used to bind to the analyte can be made completely complementary to a targeted region. Therefore, high stringency conditions are desirable in order to prevent false positives. However, conditions of high stringency are used only if the probes are complementary to regions of the chromosome which are unique in the genome. The stringency of hybridization is determined by a number of factors during hybridization and during the washing procedure, including temperature, ionic strength, base composition, probe length, and concentration of formamide. Under certain circumstances, the formation of higher order hybrids, such as triplexes, quadraplexes, etc., may be desired to provide the means of binding target sequences.

[0059] Detection, if any, of the resulting hybrid is usually accomplished by the use of labeled probes. Alternatively, the probe may be unlabeled, but may be detectable by specific binding with a ligand which is labeled, either directly or indirectly. Suitable labels, and methods for labeling probes and ligands are known in the art, and include, for example, radioactive labels which may be incorporated by known methods (e.g., nick translation, random priming or kinasing), biotin, fluorescent groups, chemiluminescent groups (e.g., dioxetanes, particularly triggered dioxetanes), enzymes, antibodies and the like. Variations of this basic scheme are known in the art, and include those variations that facilitate separation of the hybrids to be detected from extraneous materials and/or that amplify the signal from the labeled moiety. A number of these variations are reviewed in e.g., U.S. Pat. No. 4,868,105, and in EPO Publication No. 225,807.

[0060] Once a sufficient quantity of desired tumor-associated polypeptide has been obtained, it may be used for various purposes. A typical use is the production of antibodies specific for binding. These antibodies may be either polyclonal or monoclonal, and may be produced by in vitro or in vivo techniques well known in the art. For production of polyclonal antibodies, an appropriate target immune system, typically mouse or rabbit, is selected. Substantially purified antigen is presented to the immune system in a fashion determined by methods appropriate for the animal and by other parameters well known to immunologists. Typical sites for injection are in footpads, intramuscularly, intraperitoneally, or intradermally. Of course, other species may be substituted for mouse or rabbit. Polyclonal antibodies are then purified using techniques known in the art, adjusted for the desired specificity.

[0061] An immunological response is usually assayed with an immunoassay. Normally, such immunoassays involve some purification of a source of antigen, for example, that produced by the same cells and in the same fashion as the antigen. A variety of immunoassay methods are well known in the art.

[0062] Monoclonal antibodies with affinities of 10-8 M-1 or preferably 10-9 to 10-10 M-1 or stronger will typically be made by standard procedures. Briefly, appropriate animals will be selected and the desired immunization protocol followed. After the appropriate period of time, the spleens of such animals are excised and individual spleen cells fused, typically, to immortalized myeloma cells under appropriate selection conditions. Thereafter, the cells are clonally separated and the supernatants of each clone tested for their production of an appropriate antibody specific for the desired region of the antigen.

[0063] Other suitable techniques involve in vitro exposure of lymphocytes to the antigenic polypeptides, or alternatively, to selection of libraries of antibodies in phage or similar vectors. The polypeptides and antibodies of the present invention may be used with or without modification. Frequently, polypeptides and antibodies will be labeled by joining, either covalently or non-covalently, a substance which provides for a detectable signal. A wide variety of labels and conjugation techniques are known and are reported extensively in both the scientific and patent literature. Suitable labels include radionuclides, enzymes, substrates, cofactors, inhibitors, fluorescent agents, chemiluminescent agents, magnetic particles and the like. Patents teaching the use of such labels include U.S. Pat. Nos. 3,817,837; 3,850,752; 3,939,350; 3,996,345; 4,277,437; 4,275,149 and 4,366,241. Also, recombinant immunoglobulins may be produced (see U.S. Pat. No. 4,816,567).

[0064] Methods of Use: Peptide Diagnosis and Diagnostic Kits

[0065] Antibodies (polyclonal or monoclonal) may be used to detect the absence or absence of peptides encoded by tumor-associated markers of the invention. Techniques for raising and purifying antibodies are well known in the art and any such techniques may be chosen to achieve the preparations claimed in this invention. In a preferred embodiment of the invention, antibodies will immunoprecipitate proteins from solution as well as react with proteins on Western or immunoblots of polyacrylamide gels. In another preferred embodiment, antibodies will detect tumor-associated proteins in paraffin or frozen tissue sections, using immunocytochemical techniques. Antibodies specific to tumor-associated markers described herein can be employed in conjunction with toxic products that can be bound to the antibodies and selectively delivered to tumor cells via binding of the antibody with the tumor-associated polypeptide present on or in the tumor cell utilizing techniques well known in the art.

[0066] Preferred embodiments relating to methods for detecting tumor-associated proteins include enzyme linked immunosorbent assays (ELISA), radioimmunoassays (RIA), immunoradiometric assays (IRMA) and immunoenzymatic assays (IEMA), including sandwich assays using monoclonal and/or polyclonal antibodies. Exemplary sandwich assays are described by David et al. in U.S. Pat. Nos. 4,376,110 and 4,486,530.

[0067] Methods of Use: Antisensense and siRNA Therapy

[0068] The present invention contemplates an antisense polynucleotide up to about 50 nucleotides in length that hybridizes with mRNA molecules that encode a tumor-associated polypeptide, and the use of one or more of those polynucleotides in treating cancer cells. See U.S. Pat. Nos. 5,891,858 and 5,885,970, incorporated herein by reference, for further details. The antisense polynucleotide or siRNA is useful for treating cancer caused by expression of a tumor-specific or tumor-associated polypeptide. In a similar manner, siRNA molecules specific for tumor-associated nucleic acid markers of the invention can also be used to suppress transcription of said marker sequences.

[0069] In one embodiment an antisense polynucleotide or siRNA is contacted with a cancer cell. The contact is carried out in vivo in a host animal, and contact is effected by administration to the animal of a pharmaceutical composition containing the polynucleotide dissolved or dispersed in a physiologically tolerable diluent so that a body fluid such as blood or lymph provides at least a portion of the aqueous medium. In vivo contact is maintained until the polynucleotide is eliminated from the mammal's body by a normal bodily function such as excretion in the urine or feces or enzymatic breakdown. The polynucleotide may be injected directly into the tumor in an aqueous medium (an aqueous composition) via a needle or other injecting means and the composition is injected throughout the tumor as compared to being injected in a bolus. For example, an aqueous composition containing an antisense polynucleotide or siRNA, the inverts or mixtures thereof is injected into tumors via a needle. The needle is placed in the tumors and withdrawn while expressing the aqueous composition within the tumor. That mode of administration is carried out in three approximately orthogonal planes in the tumors.

[0070] This administration technique has the advantages of delivering the polynucleotide directly to the site of action and avoids most of the usual body mechanisms for clearing drugs. Tumors can be located using e.g., modern imaging techniques such as X-ray, ultrasound and MRI so that exact placement of the polynucleotide can be carried out.

[0071] A polynucleotide can also be administered in the form of liposomes. As is shown in the art, liposomes are generally derived from phospholipids or other lipid substances. Liposomes are formed by mono or multi-lamellar hydrated liquid crystals that are dispersed in an aqueous medium. Any non-toxic, physiologically acceptable and metabolizable lipid capable of forming liposomes can be used. The present compositions in liposome form can contain stabilizers, preservatives, excipients, and the like in addition to the agent.

[0072] An antisense polynucleotide or siRNA can also be administered by gene therapy. The polynucleotide may be introduced into the cell in a vector such that the polynucleotide remains extrachromosomal. In such a situation, the polynucleotide will be expressed by the cell from the extrachromosomal location. Vectors for introduction of polynucleotides for extrachromosomal maintenance are known in the art, and any suitable vector may be used. Methods for introducing DNA into cells such as electroporation, calcium phosphate coprecipitation and viral transduction are known in the art, and the choice of method is within the competence of a person of ordinary skill in the art.

[0073] The antisense polynucleotide or siRNA, may be employed in gene therapy methods in order to decrease the amount of the expression products in cancer cells, especially in those cases where overexpressed. Such gene therapy is particularly appropriate for use in both cancerous and pre-cancerous cells.

[0074] Gene therapy would be carried out according to generally accepted methods, for example, as described in further detail in U.S. Pat. No. 5,747,282 and references cited therein, all incorporated by reference herein. Expression vectors in the context of gene therapy are meant to include those constructs containing sequences sufficient to express a polynucleotide that has been cloned therein. In viral expression vectors, the construct contains viral sequences sufficient to support packaging of the construct. If the polynucleotide encodes an antisense polynucleotide or siRNA or a ribozyme, expression will produce the antisense polynucleotide or siRNA or ribozyme. Thus in this context, expression does not require that a protein product be synthesized. In addition to the polynucleotide cloned into the expression vector, the vector also contains a promoter functional in eukaryotic cells. The cloned polynucleotide sequence is under control of this promoter. Suitable eukaryotic promoters include those described above. The expression vector may also include sequences, such as selectable markers and other sequences conventionally used.

[0075] Gene transfer techniques which target DNA directly to specific tumor cell types are preferred. Receptor-mediated gene transfer, for example, is accomplished by the conjugation of DNA (usually in the form of covalently closed supercoiled plasmid) to a protein ligand via polylysine. Ligands are chosen on the basis of the presence of the corresponding ligand receptors on the cell surface of the target cell/tissue type. These ligand-DNA conjugates can be injected directly into the blood if desired and are directed to the target tissue where receptor binding and internalization of the DNA-protein complex occurs. To overcome the problem of intracellular destruction of DNA, coinfection with adenovirus can be included to disrupt endosome function.

[0076] Methods of Use: Transformed Hosts; Transgenic/Knockout Animals and Models

[0077] In one embodiment of the invention, a transgene is introduced into a non-human host to produce a transgenic animal expressing a human or murine tumor-specific or tumor-associated gene. The transgenic animal is produced by the integration of the transgene into the genome in a manner that permits the expression of the transgene. Methods for producing transgenic animals are generally described e.g., in U.S. Pat. No. 4,873,191.

[0078] Transgenic animals may be produced from the fertilized eggs from a number of animals including, but not limited to reptiles, amphibians, birds, mammals, and fish. Within a particularly preferred embodiment, transgenic mice are generated which overexpress the polypeptide. Alternatively, the absence of the polypeptide in <<knock-out>> mice permits the study of the effects that loss of protein has on a cell in vivo. Knock-out mice also provide a model for the development of cancers.

[0079] Methods for producing knockout animals have been described previously. The production of conditional knockout animals, in which the gene is active until knocked out at the desired time is also known by those of ordinary skill in the art.

[0080] As noted above, transgenic animals and cell lines derived from such animals may find use in certain testing experiments. In this regard, transgenic animals and cell lines capable of expressing a tumor-specific or tumor-associated gene may be exposed to test substances. These test substances can be screened for the ability to reduce overexpression of the gene or impair the expression or function of a protein encoded by the gene.

[0081] In another embodiment, the invention provides a method for assaying expression of EST's utilizing microarrays comprising antibodies to the tumor-associated EST's of the invention.

[0082] In another embodiment, the invention provides a method for assaying for tumor EST's utilizing microarrays containing polypeptides or fragments thereof encoded and expressed by the tumor-associated EST's of the invention.

[0083] In another embodiment, the invention provides a method for assaying for tumor-associated EST's utilizing microarrays comprising nucleic acids specific for the tumor-related EST's of the invention.

[0084] The newly developed technique of nucleic acid analysis via microchip technology is also applicable to the present invention. In this technique, literally thousands of distinct oligonucleotide probes are built up in an array on a silicon chip. Nucleic acid to be analyzed is fluorescently labeled and hybridized to the probes on the chip. It is also possible to study nucleic acid-protein interactions using these nucleic acid microchips. Using this technique one can determine the presence of a sequence or expression levels of a gene of interest. The method is one of parallel processing of many, even thousands, of probes at once and can tremendously increase the rate of analysis.

[0085] It is also known in to persons of ordinary skill in the art that microchip technology is applicable to screening large numbers of samples by detecting antibody/antigen interactions. Utilizing cell type specific transcripts detected with the methods of the present invention, large numbers of cells from different stages of expression can be screened for expression of antigens. For a general description, see e.g., U.S. Pat. No. 6,379,895.

[0086] The nucleic acid, protein or antibody to the protein encoded by the nucleic acid may also be incorporated on a microarray. The preparation and use of microarrays are well known in the art. Generally, the microarray may contain the entire nucleic acid or protein, or it may contain one or more fragments of the nucleic acid or protein. Similarly, the microarray may contain an antibody or only the portion of the antibody necessary for binding antigen. It is contemplated by the invention that single chain antibodies may be utilized in the detection of tumor antigen or portions thereof. Suitable nucleic acid fragments may include at least 17 nucleotides, at least 21 nucleotides, at least 30 nucleotides or at least 50 nucleotides of the nucleic acid sequence, particularly where the nucleic acid marker comprises a coding sequence. Suitable protein fragments may include at least 4 amino acids, at least 8 amino acids, at least 12 amino acids, at least 15 amino acids, at least 17 amino acids or at least 20 amino acids.

[0087] In another embodiment, the invention provides methods for vaccinating an animal with tumor-associated polypeptides of the invention as an immunogen. A method of vaccination can comprise administering at least a fragment of a polypeptide encoded by the tumor-associated markers of the present invention. Methods for the administration of such fragments of a peptide are known to a person of ordinary skill in the art and can include administering additional peptide sequences as an adjuvant. In a preferred embodiment, the peptides are administered under conditions which will elicit a cytotoxic T-cell response to a tumor expressing a tumor-associated marker described in the present invention.

[0088] Cytotoxic T Lymphocytes (CTL) are an important means by which a mammalian organism defends itself against cancer. Functional studies of viral and tumor-associated T cells have confirmed that a minimal cytotoxic epitope consisting of a peptide of 8-12 amino acids can prime an antigen presenting cell to be lysed by CD8⁺ CTL, as long as the antigen presenting cell presents the epitope in the context of the correct MHC molecule. It is contemplated that the immunogen may comprise a minimal cytotoxic epitope on the tumor marker polypeptide. Minimal cytotoxic epitopes generally have been most effective when administered in the form of a lipidated peptide together with a helper CD4 epitope. Peptides administered alone, however, also can be highly effective.

[0089] As used herein, the singular form “a”, “an”, “said” and “the” include plural references unless the context clearly indicates otherwise. For example, a reference to a “cell” would include a plurality of cells.

[0090] As used herein, the terms “diagnosing” or “prognosing,” as used in the context of neoplasia, are used to indicate 1) the classification of lesions as neoplasia, 2) the determination of the severity of the neoplasia, or 3) the monitoring of the disease progression, prior to, during and after treatment.

[0091] “Encode”. A polynucleotide is said to “encode” a polypeptide if, in its native state or when manipulated by methods well known to those skilled in the art, it can be transcribed and/or translated to produce the mRNA for and/or the polypeptide or a fragment thereof. The anti-sense strand is the complement of such a nucleic acid, and the encoding sequence can be deduced therefrom.

[0092] “Isolated” or “substantially pure”. An “isolated” or “substantially pure” nucleic acid (e.g., an RNA, DNA or a mixed polymer) is one which is substantially separated from other cellular components which naturally accompany a native human sequence or protein, e.g., ribosomes, polymerases, many other human genome sequences and proteins. The term embraces a nucleic acid sequence or protein which has been removed from its naturally occurring environment, and includes recombinant or cloned DNA isolates and chemically synthesized analogs or analogs biologically synthesized by heterologous systems.

[0093] As used herein, the terms “tumor-associated marker” and “stress-associated marker” are meant to include nucleic acids or fragments thereof and polypeptides or fragments thereof that are specifically disclosed herein as associated with the indicated phenotype, as well as other nucleic acids or polypeptides or fragments thereof that comprise said polypeptides and nucleic acids and fragments thereof that can be detected with the methods of the present invention and are not known in the prior art to be associated with the particular phenotype.

[0094] As used herein, phenotype associated “marker expression” is meant to include the expression of all or a fragment of a specific (e.g., tumor-specific) or associated (e.g., tumor-associated) marker. Thus, as will be recognized by those of ordinary skill in the art, detection of marker expression is meant to include all known methods for detecting of gene expression, including but not limited to e.g. detecting the expression of an mRNA or fragment thereof (e.g., an EST) for the marker or detecting the expression of a polypeptide or fragment thereof encoded by a tumor associated marker of the invention. Polypeptide or fragments thereof can be detected by antibodies which specifically bind to the polypeptide or fragment thereof and allow its detection in various assay as known in the art such as Western blots, ELISA and the like.

[0095] The practice of the present invention employs, unless otherwise indicated, conventional techniques of chemistry, molecular biology, microbiology, recombinant DNA, genetics, immunology, cell biology, cell culture and transgenic biology, which are within the skill of the art.

[0096] General Methods

[0097] MTC panels. We used CLONTECH Multiple Tissue cDNA (MTC™) panels, which contain sets of normalized first-strand cDNA generated using CLONTECH Premium RNAT™ from different human tumors and normal tissues. These tissue-specific first strand cDNA's were used as templates in conjunction with tissue-specific tumor EST-derived primers in PCR studies to determine if tumor-associated EST's detected with the methods of the present invention were The following panels were used: Human Tumor MTC Panel (K1422-1), Human MTC Panel I (K1420-1), Human MTC Panel II (K1421-1), Human Immune System MTC Panel (K1426-1), and Human Fetal MTC Panel (K1425-1).

[0098] PCR analysis. PCR of genomic DNA was carried out in 25 μl of the following reaction mixture: 67 mM Tris-HCl (pH 8.9), 4 mM MgCl₂, 16 mM (NH₄)SO₄, 10 mM 2-mercaptoethanol, 0.1 mg/ml BSA, 200 μM (each) dNTP, specific forward and reverse primers (10 pmol each), 2.5U Taq polymerase, and 500 ng of genomic DNA. The samples were incubated in a PTC-200 thermocycler (MJ Research, USA) for the total of 35 cycles. Each cycle consisted of 30 s at 95° C., 30 s at 56° C. for forv/rev16 or at 58° C. for forw/rev8, forw/rev19, and forw/rev28, and 1 min at 72° C. DNA primers for PCR sequencing and the size of fragments generated for each cluster sequence were as follows:

[0099] Hs.154173:

[0100] forward16: (SEQ ID NO:1) 5′-TCT TTC TTG ATG AAT TAT CTT ATG-3′; reverse16: (SEQ ID NO:2) 5′-ACA CAC CCT CAT TCC CGC-3′; fragment size: 443 bp.

[0101] Hs.133294:

[0102] forward8: (SEQ ID NO:3) 5′-GTC AAC CTT CTC ATC TTC CTC-3′; reverse8: (SEQ ID NO:4) 5′-CAG GAA GTT GGG TAGATG TG-3′; fragment size: 1) 412 bp fragment size: 2) 1084 bp.

[0103] Hs.67624:

[0104] forward19:(SEQ ID NO:5) 5′-TAA TTG CAT TCT TCA AAA TTC TAC-3′;

[0105] reverse19: (SEQ ID NO:6) 5′-GCT TCG CAC CAT TGAATA AAC-3′; fragment size: 315 bp.

[0106] Hs.133107:

[0107] forward 28: (SEQ ID NO:7) 5′-TAC ATA GTT GTT ATC TTA AGG TG-3′; reverse 28: (SEQ ID NO: 8) 5′-TGG GAA TTC TAT ACT TTT GAC-3′; fragment size: 344 bp.

[0108] The expression of nucleotide sequences under study was analyzed in different tissues using CLONTECH cDNA panels and Titanium Taq PCR kit ( K1915-1). Reaction mixtures of a 25-μl volume were prepared according to the manufacturer's instructions for cDNA panels. PCR was carried out under the following conditions: 1 min at 95° C., 35 cycles consisting of 30 s at 95° C., 30 s at 56° C., for forw/rev16 or at 58° C., for forw/rev8, forw/rev19, or forw/rev28, and. 1 min at 68° C. The terminal stage of the reaction was 5 min at 68° C.

[0109] Electrophoresis. The amplification products were separated by electrophoresis in 2% agarose gel and detected by staining with ethidium bromide. 8 μl of PCR mixture was taken per lane.

[0110] Computer programs. Homology searches were performed using BLAST computer programs on a NCBI server (www.ncbi.nlm.nih.gov). Exon-intron boundaries and putative gene elements were predicted using program tools using techniques well known in the art and described in detail for example at the WebGene server (http://www.itba.mi.cnr.itlwebgene/) and on the search engine of Baylor College of Medicine. (http://kiwi.imgen.bcm.tmc.edu:8088/search-launcher/launcher.html).

[0111] Determination of exon-intron boundaries are indicative of genes as transcribed genomic units producing pre-mRNA spliced during RNA maturation.

[0112] The present invention is described by reference to the following Examples, which are offered by way of illustration and are not intended to limit the invention in any manner. Standard techniques well known by persons of ordinary skill in the art and/or the techniques specifically described herein were utilized.

### EXAMPLE 1

[0113] Utilizing publicly available EST sequence data and HSAnalyst, available clusters were organized into the ranges shown in Table 1. The software utilized in this example made possible the arrangement of sub ranges exponentially (e.g., sub ranges with exponents 1-2,3-4, 5-8,9-16) or linearly (sub ranges with factors 1-10, 11-20, 21-30). In this Example, the sub ranges were arranged linearly. Totally, 2681 libraries were classified as “tumor” libraries, while 1087 libraries were classified as “normal”. The supplemental database resulting from this differential comparison contained 921,237 “tumor” ESTs and 810,097 “normal” ESTs. Of these, 83 EST clusters were identified as putative tumor markers, possessing a percentage of tumor-specific EST's/total EST's of at least 90%. The classes of tumor related EST clusters revealed by the methods of the present invention were further classified into five distinct categories based on information provided about the sequences in the public databases, as detailed below in Tables 3-6. The clusters found to be tumor related included non-coding mRNAs, non-coding mRNAs with strict tumor specific expression, genes that encode proteins with weak homology to known proteins (as used herein, “weak refers to statistically significant homology that is not indicative of function or inclusion in the same gene family), genes that encode known proteins and genes that encode known proteins with a tumor associated expression. In some instances, EST clusters are tumor specific, not being expressed in the normal EST libraries. In other instances, the tumor EST's detected are tumor related, i.e., expressed at significantly higher levels in tumor cells versus normal cell sources. Table 1 represents an analysis of the number of tumor-associated EST's observed with the methods of the present invention.

[0114] Table I.

| | | | | Number of tumor-specific | | | |
|---|---|---|---|---|---|---|---|
| Sub-range of | EST number | | | clusters at threshold, %* | | | |
| # of EST's | # EST's per | # clusters | Tumor specific | >90% | | 100% | |
| per cluser | sub-range | per sub-range | EST's, % | Observed | Expected | Observed | Expected |
| 1-2 | 59111 | 44373 | 42% | 18342 | 23073 | 18342 | 23073 |
| 3-4 | 45400 | 13401 | 35% | 1880 | 1884 | 1880 | 1884 |
| 5-8 | 53569 | 8742 | 37% | 567 | 279 | 567 | 172 |
| 9-16 | 63421 | 5407 | 39% | 168 | 5 | 99 | 4 |
| 17-32 | 83968 | 3607 | 41% | 45 | 0 | 17 | 0 |
| 33-64 | 176845 | 3762 | 43% | 16 | 0 | 2 | 0 |
| 65-128 | 349008 | 3790 | 45% | 10 | 0 | 2 | 0 |
| 129-256 | 460493 | 2588 | 47% | 8 | 0 | 0 | 0 |
| 257-512 | 339482 | 975 | 50% | 3 | 0 | 0 | 0 |
| 513-1024 | 208171 | 303 | 53% | 1 | 0 | 0 | 0 |
| 1025-2048 | 130524 | 96 | 57% | 0 | 0 | 0 | 0 |
| 2049-4096 | 95180 | 36 | 60% | 0 | 0 | 0 | 0 |
| 4097-8192 | 49804 | 10 | 66% | 0 | 0 | 0 | 0 |
| 8193-16384 | 14725 | 1 | 67% | 0 | 0 | 0 | 0 |

[0115] An exemplary method for detecting tumor-associated EST's comprised retrieving sequence data on EST's from all available EST's, arranging the EST's into individual clusters based on homology, identifying EST's expressed in tumor cells and, for each cluster, calculating the percentage of the number of ESTs expressed in tumor cells to all EST's contained in the cluster. A threshold value for the percentage of the number of ESTs expressed in tumor cells to all ESTs for each cluster was chosen to identify tumor related clusters. In one example, the percentage of tumor-derived EST's to normal EST's per cluster was a user-defined threshold of at least 90%. Clusters having a percentage of EST's expressed in tumor cells to all EST's for a cluster greater than the threshold value were considered as tumor-associated. Thus, tumor-associated markers represent those nucleic acid or polypeptide or fragments thereof that comprise at least 90% of the sequences in an EST cluster. Some sequences observed were markers that represented nucleic acid or polypeptides or fragments thereof that comprised 100% of the sequences in a cluster.

[0116] In Table I, there are shown the results of detection of clusters observed at different ranges, with the number of observed tumor related clusters observed versus the number calculated or expected. Clusters were sorted into ranges on a linear basis in this example.

[0117] Using global analysis of cluster data with the methods of the present invention, it has been demonstrated that the sequences of Table 2 represent tumor-associated sequences.

TABLE II

| | | | SURFACE, IF KNOWN | REFERENCE | REFERENCE |
|---|---|---|---|---|---|
| | | | KNOWN TUMOR | NUCLEOTIDE | PROTEIN |
| UNIGENE ID | GENE NAME | TUMOR TYPES | MARKER INDICATED | SEQUENCE | SEQUENCE(S) |
| Hs.203 | CCKBR (Cholecystoki-nin B receptor) | Choriocarcinoma, glioma, germ cell | SURFACE | SEQ. ID NO: 9 | SEQ. ID NO: 10 |
| | | tumors, lung carcinoma, | | | |
| | | teratocarcinoma | | | |
| Hs.419 | DLX2 (Distal-less homeo box 2 | small cell lung carcinoma, pancreatic | | SEQ. ID NO: 11 | SEQ. ID NO: 12 |
| | | carcinoma, intestinal | | | |
| | | carcinoma, ovary carcinoma | | | |
| Hs.560 | APOBEC1 ApolipoproteinB mRNA | colon carcinoma; B-cell chronic | | SEQ. ID NO: 13 | SEQ. ID NO: 14 |
| | editing enzyme, cata-lytic | lymphotic leukemia; | | | |
| | polypeptide 1 | | | | |
| Hs.575 | ALDH3A1 | Pancreatic carcinoma, glioma, | | SEQ. ID NO: 15 | SEQ. ID NO: 16 |
| | (Aldehydedehydrogenase 3 | cervical carcinoma , lung | | | |
| | family, member A1) | carcinoma, uterine carcinoma, | | | |
| | | germ cell tumors, gastric carcinoma, | | | |
| | | colon carcinoma, salivary gland | | | |
| | | carcinoma, bladder carcinoma | | | |
| Hs.1085 | GUCY2C Guanylate cyclase 2C | stomach carcinoma, colon carcinoma | SURFACE, | SEQ. ID NO: 17 | SEQ. ID NO: 18 |
| | (heat stable enterotoxin | | KNOWN TUMOR | | |
| | receptor) | | MARKER | | |
| Hs.1149 | LMO1 LIM domain only 1 | Glioma, retinoblastoma, lung | KNOWN MARKER | SEQ. ID NO: 19 | SEQ. ID NO: 20 |
| | (rhombotin 1) | carcinoid tumors, pancreatic | FOR LEUKEMIA | | |
| | | insulinoma | | | |
| Hs.1619 | ASCL1 Achaete-scute complex- | neuroblastoma, glioma lung carcinoid tumors, | KNOWN TUMOR | SEQ. ID NO: 21 | SEQ. ID NO: 22 |
| | like 1 (Drosophila-like) | germ cell tumors, kidney tumor, | MARKER | | |
| | | medulloblastoma, ovary tumors | | | |
| Hs.1854 | KCNA4 Potassium voltage-gated | lung carcinoid tumors, lung carcinomas | SURFACE | SEQ. ID NO: 23 | SEQ. ID NO: 24 |
| | channel, shaker-related | | | | |
| | subfamily, member 4 | | | | |
| Hs.1925 | DSG3 Desmoglein 3 (pemphigus | lung carcinomas, pancreatic carcinoma | RARANEOPLASTIC | SEQ. ID NO: 25 | SEQ. ID NO: 26 |
| | vulgaris antigen) | | MARKER | | |
| Hs.2266 | CHRNA1 Cholinergic receptor, | Rhabdomyosarcoma | SURFACE | SEQ. ID NO: 27 | SEQ. ID NO: 28 |
| | nicotinic, alpha polypeptide | | | | |
| | 1 (muscle) | | | | |
| Hs.2693 | GLI Glioma-associated | Rhabdomyosarcoma, germ cell tumors, | KNOWN MARKER | SEQ. ID NO: 29 | SEQ. ID NO: 30 |
| | oncogene homolog (zinc finger | leiomyosarcoma, ovarian tumors, melanoma, | FOR GLIOMA | | |
| | protein) | burkitt lymphoma | | | |
| Hs.2860 | POU5F1 POU domain, class 5, | gastric carcinoma, germ cell tumors, uterus | KNOWN MARKER | SEQ. ID NO: 31 | SEQ. ID NO: 32 |
| | transcription factor 1 | carcinoma, ovarian tumors, teratocarcinoma | FOR GERM CELL | | |
| Hs.2928 | SLC7A1 Solute carrier family | melanoma, glioma, rhabdomyosarcoma | SURFACE | SEQ. ID NO: 33 | SEQ. ID NO: 34 |
| | 7 (cationic amino acid | neuroblastoma, colon carcinomas, lymphoma | | | |
| | transporter, y + system), | | | | |
| | member 1 | | | | |
| Hs.3057 | ZNF74 Zinc finger protein 74 | cervical carcinoma , leiomyosarcoma, | | SEQ. ID NO: 35 | SEQ. ID NO: 36 |
| | (Cos52) | rhabdomyosarcoma glioma , teratocarcinoma | | | |
| | | neuroblastoma , prostate carcinoma, colon | | | |
| | | carcinoma , choriocarcinoma, bladder | | | |
| | | transitional cell papilloma | | | |
| Hs.3104 | KIAA0042 (KIAA0042 gene | Leiomyosarcoma, testicular cancer, prostate | | SEQ. ID NO: 37 | SEQ. ID NO: 38 |
| | product) | carcinoma, bladder carcinoma, kidney | | | |
| | POM1 | hypernephroma, ovarian tumors, lung | | | |
| | | carcinoma | | | |
| Hs.5366 | EPS8R3 Epidermal growth | Colon carcinoma, kidney tumors, germ cell | | SEQ. ID NO: 39 | SEQ. ID NO: 40 |
| | factor receptor pathway | tumors, stomach carcinoma | | | |
| | substrate 8 related protein 3 | | | | |
| Hs.6168 | KIAA0703 (KIAA0703 gene | Pancreatic carcinoma, colon carcinoma, | | SEQ. ID NO: 41 | SEQ. ID NO: 42 |
| | product) | bladder transitional cell papilloma, ovarian | | | |
| | POM2 | carcinoma, breast carcinoma , lung carcinoma | | | |
| Hs.30743 | PRAME Preferentiallyexpressed | Brain neuroblastoma, melanoma, lung | KNOWN TUMOR | SEQ. ID NO: 43 | SEQ. ID NO: 44 |
| | antigen in melanoma | carcinoma , small intestine carcinoma, | MARKER FOR | | |
| | | retinoblastoma, leiomyosarcoma, uterus | MELANOMA | | |
| | | carcinoma, choriocarcinoma ,kidney | | | |
| | | carcinoma, ovarian carcinoma, bresat | | | |
| | | carcinoma, germ cell tumor, esophageal | | | |
| | | squamous cell carcinoma, colon juvenile | | | |
| | | granulosa tumor, cervical carcinoma | | | |
| Hs.30751 | LOC55924 Hypothetical protein | Retinoblastoma, rhabdomyosarcoma, prostate | | SEQ. ID NO: 45 | SEQ. ID NO: 46 |
| | LOC55924 POM3 | carcinoma, Burkitt lymphoma | | | |
| Hs.36793 | SLC12A8 Solute carrier family | Lymphoma, colon, ovarian, stomach, prostate | SURFACE | SEQ. ID NO: 47 | SEQ. ID NO: 48 |
| | 12 (potassium/chloride | endometrial and hepatic carcinomas | | | |
| | transporters), member 8 | | | | |
| Hs.37045 | PTH Parathyroid hormone | parathyroid tumor | KNOWN TUMOR | SEQ. ID NO: 49 | SEQ. ID NO: 50 |
| | | | MARKER | | |
| Hs.37107 | MAGEA4 Melanoma antigen, | intestine duodenal carcinoma, glioma, | KNOWN TUMOR | SEQ. ID NO: 51 | SEQ. ID NO: 52 |
| | family A, 4 | pharynx squamous cell, uterus, ovarian, | MARKER FOR | | |
| | | melanoma | MELANOMA | | |
| Hs.37110 | MAGEA9 Melanoma | Lung carcinoma, bladder transitional cell | KNOWN TUMOR | SEQ. ID NO: 53 | SEQ. ID NO: 54 |
| | antigen, familyA, 9 | papilloma, T cell leukemia, genitourinary | MARKER FOR | | |
| | | tract transitional cell tumors | MELANOMA | | |
| Hs.46452 | SCGB2A2 Secretoglobin, family | lung carcinoma | SURFACE | SEQ. ID NO: 55 | SEQ. ID NO: 56 |
| | 2A, member 2 | | | | |
| Hs.48956 | GJB6 Gap junction protein, | glioma, prostate carcinoma, uterus | SURFACE | SEQ. ID NO: 57 | SEQ. ID NO: 58 |
| | beta 6 (connexin 30) | carcinoma, pancreatic carcinoma, skin | | | |
| | | squamous cell carcinoma | | | |
| Hs.49605 | ESTs, Weakly similar to | melanoma | | SEQ. ID NO: 59 | SEQ. ID NO: 60 |
| | hypothetical protein FLJ22184 | | | | |
| | [Homo sapiens] | | | | |
| | POM4 | | | | |
| Hs.53563 | COL9A3 Collagen, type IX, | melanoma, choriocarcinoma, B-cell chronic | | SEQ. ID NO: 61 | SEQ. ID NO: 62 |
| | alpha 3 | lymphotic leukemia, germ cell, uterus serous | | | |
| | | carcinoma, stomach carcinoma, retinoblastoma | | | |
| | | sarcoma, glioma, cervical carcinoma | | | |
| Hs.54424 | HNF4A Hepatocyte nuclear | Kidney tumors, germ cell tumors, colon | | SEQ. ID NO: 63 | SEQ. ID NO: 64 |
| | factor 4, alpha | carcinoma | | | |
| Hs.54567 | PAX1 Paired box gene 1 | leiomyosarcoma | | SEQ. ID NO: 65 | SEQ. ID NO: 66 |
| Hs.66357 | POM5 | Endometrial, pancreatic, lymphoma, lung B- | | SEQ. ID NO: 67 | SEQ. ID NO: 68 |
| | | cell chronic lymphocytic leukemia | | | |
| Hs.67397 | HOXA1 Homeobox A1 | melanoma, teratocarcimoma, germ cell tumors | | SEQ. ID NO: 69 | SEQ. ID NO: 70 |
| | | stomach carcinoma, hypernephroma, bladder | | | SEQ. ID NO: 71 |
| | | carcinoma | | | SEQ. ID NO: 72 |
| Hs.67624 | POM6 | germ cell tumors | | SEQ. ID NO: 73 | SEQ. ID NO: 74 |
| Hs.68864 | Membrane-bound phosphatidic | B-cell chronic lymphocytic leukemia, colon, | SURFACE | SEQ. ID NO: 75 | SEQ. ID NO: 76 |
| | acid-selective phospholipasE | stomach, pancreatic carcinomas | | | |
| | A1 | | | | |
| Hs.73893 | DRD2 Dopamine receptor D2 | Lung carcinoma, neuroblastoma, glioma, | SURFACE | SEQ. ID NO: 77 | SEQ. ID NO: 78 |
| | | pancreas carcinoma, rhabdomyosarcoma | | | |
| Hs.73952 | PRH2 Proline-rich protein | Nervous tumors, colon carcinoma, | SECRETED | SEQ. ID NO: 79 | SEQ. ID NO: 80 |
| | HaeIII subfamily 2 | head and neck squamous cell carcinoma | | | |
| Hs.74126 | FABP6Fatty acid binding | Lymphoma, uterus carcinoma, kidney | | SEQ. ID NO: 81 | SEQ. ID NO: 82 |
| | protein 6, ilealgastrotropin) | Carcinoma, lung carcinoid tumors, ovarian | | | |
| Hs.79414 | PDEF Prostate epithelium- | Pancreatic, colon, endometrial, breast, | KNOWN MARKER- | SEQ. ID NO: 83 | SEQ. ID NO: 84 |
| | specific Ets transcription | lung, ovarian, stomach, prostate carcinomas | BREAST CARCINOMA | | |
| | factor | and glioma | POSSIBLYPROSTATIC | | |
| | | | CARCINOMA) | | |
| Hs.86232 | GDF3 Growth differentia-tion | germ cell tumors, neuroepithelial tumors | Embryonal | SEQ. ID NO: 85 | SEQ. ID NO: 86 |
| | factor 3 | | carcinoma stem | | |
| | | | cell-associated | | |
| | | | marker; Possibly | | |
| | | | GERM CELL TUMORS | | |
| Hs.87225 | CTAG2 Cancer/testis antigen 2 | choriocarcinoma, breast carcinoma, | KNOWN TUMOR | SEQ. ID NO: 87 | SEQ. ID NO: 88 |
| | | endometrium carcinoma, melanoma, stomach | MARKER | | |
| | | carcinoma | | | |
| Hs.89143 | POM7 | ovarian tumors | | SEQ. ID NO: 89 | SEQ. ID NO: 90 |
| Hs.89605 | CHRNA3 Cholinergic receptor, | neuroblastoma, lung carcinoma, small | SURFACE | SEQ. ID NO: 91 | SEQ. ID NO: 92 |
| | nicotinic, alpha polypeptide3 | intestine carcinoma | | | |
| Hs.97258 | POM8 similar to S29539 | Pancreas, endometrial, ovarian carcinomas | | SEQ. ID NO: 93 | SEQ. ID NO: 94 |
| | ribosomal protein L13a, | lung carcinoid tumors and germ cell tumors | | | |
| | cytosolic | | | | |
| Hs.97283 | POM9 | ovarian tumors | | SEQ. ID NO: 95 | SEQ. ID NO: 96 |
| Hs.97860 | KIAA1484 KIAA1484 protein | Ovarian carcinoma, retinoblastoma, | | SEQ. ID NO: 97 | SEQ. ID NO: 98 |
| | | endometrium carcinoma | | | |
| Hs.98988 | POM10 Homo sapiens, clone | germ cell tumors, hypernephroma, ovarian | | SEQ. ID NO: 99 | SEQ. ID NO: 100 |
| | IMAGE:4425111, mRNA, partial | tumors, colon, uterus, stomach, pancreas | | | |
| | cds | skin squamous cell carcinomas | | | |
| Hs.99624 | POM11 | parathyroid tumor, | | SEQ. ID NO: 101 | SEQ. ID NO: 102 |
| | | ovarian tumor, Stomach carcinoma | | | |
| Hs.99960 | MS4A3 Membrane-spanning 4- | Lung carcinoma, chronic myelogenous | SURFACE | SEQ. ID NO: 103 | SEQ. ID NO: 104 |
| | domains, subfamily A, member | leukemia, prostate carcinoma | | | |
| | 3 (hematopoieticcell- | | | | |
| | specific) | | | | |
| Hs.103504 | ESR2 Estrogen receptor 2 (ER | germ cell tumors, lung carcinoma, | KNOWN TUMOR | SEQ. ID NO: 105 | SEQ. ID NO: 106 |
| | beta) | neuroblastoma | MARKER | | |
| Hs.103707 | MUC5AC Mucin 5, subtypes A | COLON, PANCREATIC, STOMACH CARCINOMAS, | SURFACE, | SEQ. ID NO: 107 | SEQ. ID NO: 108 |
| | and C, tracheobron- | LUNG TUMORS | MARKER FOR | | |
| | chial/gastric | | COLON AND | | |
| | | | GASTRIC | | |
| | | | CARCINOMAS | | |
| Hs.104073 | POM12 | Colon, stomach carcinoma | | SEQ. ID NO: 109 | SEQ. ID NO: 110 |
| Hs.104115 | ZNF10 Zinc finger protein 10 | parathyroid, lung carcinoid, nervous cell | | SEQ. ID NO: 111 | SEQ. ID NO: 112 |
| | (KOX1) | tumors, adrenal cortex carcinoma, germ cell | | | |
| | | tumors, uterus tumor, multiple myeloma | | | |
| Hs.105484 | REG-IV Regenerating gene type | Prostate, duodenal, colon and stomach | | SEQ. ID NO: 113 | SEQ. ID NO: 114 |
| | IV | carcinomas, B-cell chronic lymphocytic | | | |
| | | leukemia, acute myelogenous leukemia | | | |
| Hs.105667 | POM13 | ovarian tumors | | SEQ. ID NO: 115 | SEQ. ID NO: 116 |
| Hs.105924 | DEFB4 Defensin, beta 4 | Head and neck carcinoma | SECRETED | SEQ. ID NO: 117 | SEQ. ID NO: 118 |
| Hs.112341 | PI3 Protease inhibitor 3, | Glioma, B-cell chronic lymphocytic leukemia, | | SEQ. ID NO: 119 | SEQ. ID NO: 120 |
| | skin-derived (SKALP) | uterus, lung and colon carcinomas, ovarian, | | | |
| | | prostate, colon carcinomas, bladder, nervous | | | |
| | | cell and placenta tumors | | | |
| Hs.113262 | HTR45 hydroxytryptamine | Schwannona | SURFACE | SEQ. ID NO: 121 | SEQ. ID NO: 122 |
| | (serotonin) receptor 4 | | | SEQ. ID NO: 123 | SEQ. ID NO: 124 |
| Hs.114905 | ERN2 (ER to nucleus | Stomach, colon, pancreatic carcinoma | | SEQ. ID NO: 125 | SEQ. ID NO: 126 |
| | signalling 2) | | | | |
| Hs.117938 | COL17A1 Collagen, type XVII, | glioma, pancreas, lung, colon, | | SEQ. ID NO: 127 | SEQ. ID NO: 128 |
| | alpha 1 | nasopharyngeal, stomach carcinomas, germ | | | |
| | | cell, bladder, uterus tumors, | | | |
| | | leiomyosarcoma | | | |
| Hs.122310 | POM14 | parathyroid tumor | | SEQ. ID NO: 129 | SEQ. ID NO: 130 |
| Hs.123094 | SALL1 Sal-like 1 (Drosophila) | Retinoblastoma, germ cell tumors, glioma | | SEQ. ID NO: 131 | SEQ. ID NO: 132 |
| Hs.123993 | POM15 | Glioma, colon carcinoma, lung carcinoid | | SEQ. ID NO: 133 | SEQ. ID NO: 134 |
| | Weakly similar to T00366 | tumors, parathyroid tumor | | | |
| | hypothetical protein KIAA0669 | | | | |
| Hs.124173 | POM16 | parathyroid tumor | | SEQ. ID NO: 135 | SEQ. ID NO: 136 |
| Hs.124568 | POM17 | COLON CARCINOMA | | SEQ. ID NO: 137 | |
| Hs.125293 | POM18 | Glioma, lung | | SEQ. ID NO: 138 | SEQ. ID NO: 139 |
| | | carcinoma, kidney tumors, germ cell tumors | | | |
| | | parathyroid tumor, stomach carcinoma, ovary | | | |
| | | carcinoma | | | |
| Hs.126566 | POM19 | Colon carcinoma | | SEQ. ID NO: 140 | SEQ. ID NO: 141 |
| Hs.126869 | POM20 | LUNG CARCINOID TUMORS, germ cell tumor | | SEQ. ID NO: 142 | SEQ. ID NO: 143 |
| Hs.127144 | POM21 | Colon carcinoma | | SEQ. ID NO: 144 | SEQ. ID NO: 145 |
| Hs.127383 | POM22 | Colon carcinoma | | SEQ. ID NO: 146 | SEQ. ID NO: 147 |
| Hs.127476 | POM23 | Lung carcinoid tumors, glioma, kidney | | SEQ. ID NO: 148 | SEQ. ID NO: 149 |
| | Highly similar to BTG2_HUMAN | tumors, chondrosarcoma, germ cell tumors, | | | |
| | BTG2 PROTEIN PRECURSOR | Ewing's sarcoma | | | |
| Hs.128001 | POM24 | COLON CARCINOMA | | SEQ. ID NO: 150 | SEQ. ID NO: 151 |
| | | | | | SEQ. ID NO: 152 |
| Hs.128115 | POM25 Homo sapiens cDNA | germ cell,lung carcinoid and kidney tumors, | | SEQ. ID NO: 153 | SEQ. ID NO: 154 |
| | FLJ32217 fis, clone | glioma, melanoma | | | |
| | PLACE6003771 | | | | |
| Hs.128326 | POM26 | germ cell tumors | | SEQ. ID NO: 155 | SEQ. ID NO: 156 |
| Hs.128398 | POM27 | Lung carcinoid tumors | | SEQ. ID NO: 157 | |
| Hs.128436 | POM28, Moderately similar to | Lung carcinoid tumors | | SEQ. ID NO: 158 | SEQ. ID NO: 159 |
| | putative secreted protein | | | | |
| | [Homo sapiens] | | | | |
| Hs.128437 | POM29, Weakly similar to | Lung carcinoid tumors, kidney tumors, | | SEQ. ID NO: 160 | SEQ. ID NO: 161 |
| | S33477 hypothetical protein 1- | cervical carcinoma | | | |
| | rat | | | | |
| Hs.128907 | POM30, Weakly similar to | LUNG CARCINOID TUMORS | | SEQ. ID NO: 162 | SEQ. ID NO: 163 |
| | orthopedia homolog | | | | |
| | (Drosophila); orthopedia | | | | |
| | (Drosphila) homolog; | | | | |
| | orthopedia (Drosophila) | | | | |
| | homolog; Orthopedia, homolog | | | | |
| | of Drosophila gene [Homo | | | | |
| | sapiens] [H.sapiens | | | | |
| Hs.129040 | POM31 | parathyroid tumor, lung carcinoid tumors | | SEQ. ID NO: 164 | SEQ. ID NO: 165 |
| Hs.129108 | POM32 | Lung carcinoid tumors | | SEQ. ID NO: 166 | SEQ. ID NO: 167 |
| | clone IMAGE:2337282 | | | | |
| Hs.129302 | POM33 | lung carcinoma, germ cell tumors | | SEQ. ID NO: 168 | SEQ. ID NO: 169 |
| Hs.129782 | MUC3B Mucin 3B | Pancreatic carcinoma, kidney tumors, colon | PROBABLY KNOWN | SEQ. ID NO: 170 | SEQ. ID NO: 171 |
| | | carcinoma choriocarcinoma, breast carcinoma | TUMOR MARKER | | |
| | | stomach tumor, head and neck tumor, lung | | | |
| | | tumor, ovary tumor | | | |
| Hs.131358 | POM34 | germ cell tumors, choriocarcinoma | | SEQ. ID NO: 172 | SEQ. ID NO: 173 |
| Hs.132370 | NOX1 NADPH oxidase 1 | colon carcinomas, glioma, lung carcinoid | | SEQ. ID NO: 174 | SEQ. ID NO: 175 |
| | | tumors, kidney tumors, breast carcinoma | | SEQ. ID NO: 176 | SEQ. ID NO: 177 |
| Hs.132576 | Paired box gene 9 | Lung carcinoma, parathyroid tumor, stomach | | SEQ. ID NO: 178 | SEQ. ID NO: 179 |
| | | carcinoma , head and neck carcinoma | | | |
| Hs.133081 | POM35 | Esophagus carcinoma, germ cell tumors, | | SEQ. ID NO: 180 | SEQ. ID NO: 181 |
| | Homo sapiens cDNA | glioma, lung carcinoma, chondrosarcoma, | | | |
| | FLJ25124 fis | uterus carcinoma | | | |
| Hs.133089 | DFFB DNA fragmentation | Lung carcinoid tumors, breast carcinoma, | | SEQ. ID NO: 182 | SEQ. ID NO: 183 |
| | factor, 40 kD, beta | colon carcinoma, nervous cell tumor, | | | |
| | polypeptide (caspase- | leiomioma, acute myelogenous leukemia, | | | |
| | activated DNase) | osteosarcoma | | | |
| Hs.133107 | POM36 | Ovary carcinoma, lung carcinoma, glioma | | SEQ. ID NO: 184 | SEQ. ID NO: 185 |
| Hs.133294 | POM37 | Uterus carcinoma, lung carcinoma, Ovary | | SEQ. ID NO: 186 | SEQ. ID NO: 187 |
| | | carcinoma, chronic myelogenous leukemia, | | | SEQ. ID NO: 188 |
| | | breast carcinoma, glioma, colon juvenile | | | |
| | | granulosa tumor, adrenal adenoma, prostate | | | |
| | | tumor, head and neck carcinoma | | | |
| Hs.133296 | POM38 | Ovary carcinoma, lung carcinoma | | SEQ. ID NO: 189 | SEQ. ID NO: 190 |
| Hs.133300 | POM39 | Breast carcinoma, ovary carcinoma, lung | | SEQ. ID NO: 191 | SEQ. ID NO: 192 |
| | | carcinoma | | | |
| Hs.133451 | POM40 | germ cell tumors, colon carcinoma | | SEQ. ID NO: 193 | SEQ. ID NO: 194 |
| Hs.135365 | POM41 | Pancreatic carcinoma, ovarian carcinoma, | | SEQ. ID NO: 195 | SEQ. ID NO: 196 |
| | | lung carcinoma | | | |
| Hs.140457 | POM42 | Kidney tumors, lung carcinoid tumorss, | | SEQ. ID NO: 197 | SEQ. ID NO: 198 |
| | | insulinoma, glioma, cervical carcinoma, | | | |
| | | stomach tumors | | | |
| Hs.142907 | POM43 Human BRCA2 region, | Lung carcinoid tumors, fibrotheoma, ovary | | SEQ. ID NO: 199 | SEQ. ID NO: 200 |
| | mRNA sequence CG011 | tumors, uterus tumors | | | |
| Hs.143507 | T T, brachyury homolog | Lung carcinoma, B-cell chronic lymphocytic | | SEQ. ID NO: 201 | SEQ. ID NO: 202 |
| | | leukemia, breast carcinoma, germ cell tumors | | | |
| Hs.143949 | POM44 | Colon carcinoma | | SEQ. ID NO: 203 | SEQ. ID NO: 204 |
| Hs.144063 | POM45 | Lung carcinoid tumorss | | SEQ. ID NO: 205 | SEQ. ID NO: 206 |
| Hs.144121 | POM46, Moderately similar to | glioma, lung carcinoma | | SEQ. ID NO: 207 | SEQ. ID NO: 208 |
| | hypothetical protein, MNCb- | | | | |
| | 123; hypothetical protein, | | | | |
| | MNCb-1231 | | | | |
| Hs.145327 | POM47 | chronic myalogenous leukemia, Ovary | | SEQ. ID NO: 209 | SEQ. ID NO: 210 |
| | | carcinoma, colon carcinoma, lung carcinoma | | | |
| | | head and neck carcinoma | | | |
| Hs.145340 | POM48 | lung carcinoma, Ovary carcinoma, head and | | SEQ. ID NO: 211 | SEQ. ID NO: 212 |
| | | neck carcinoma | | | |
| Hs.145356 | POM49 | Ovary carcinoma, lung carcinoma | | SEQ. ID NO: 213 | SEQ. ID NO: 214 |
| Hs.145357 | POM50 | Ovary carcinoma, breast carcinoma, head and | | SEQ. ID NO: 215 | SEQ. ID NO: 216 |
| | | neck carcinoma, lung carcinoma | | | |
| Hs.145489 | POM51 | Ovary carcinoma | | SEQ. ID NO: 217 | SEQ. ID NO: 218 |
| Hs.145492 | POM52 | Ovary carcinoma, lung carcinoma | | SEQ. ID NO: 219 | SEQ. ID NO: 220 |
| Hs.145493 | POM53 | Ovary carcinoma, uterus tumor | | SEQ. ID NO: 221 | SEQ. ID NO: 222 |
| Hs.145500 | POM54 | Ovary carcinoma, lung carcinoma | | SEQ. ID NO: 223 | SEQ. ID NO: 224 |
| Hs.145509 | POM55 | Lung carcinoma, ovary carcinoma, breast | | SEQ. ID NO: 225 | SEQ. ID NO: 226 |
| | | carcinoma, glioma, stomach carcinoma | | | |
| Hs.145661 | POM56 | Colon carcinoma | | SEQ. ID NO: 227 | SEQ. ID NO: 228 |
| Hs.145809 | POM57, Weakly similar to | Uterus carcinoma, stomach carcinoma, | | SEQ. ID NO: 229 | |
| | T31613 hypothetical protein | pancreatic carcinoma, placenta tumor | | | |
| | Y50E8A.i - Caenorhabditis | | | | |
| | elegans | | | | |
| Hs.146200 | POM58 | Ovary carcinoma, breast carcinoma, head and | | SEQ. ID NO: 230 | SEQ. ID NO: 231 |
| | | neck carcinoma | | | |
| Hs.147291 | POM59 | germ call tumors | | SEQ. ID NO: 232 | SEQ. ID NO: 233 |
| Hs.148661 | POM60 | Lung carcinoid tumors, germ cell tumors | | SEQ. ID NO: 234 | SEQ. ID NO: 235 |
| Hs.152290 | POM61, Highly similar to | Rhabdomyosarcoma, glioma, colon carcinoma | | SEQ. ID NO: 236 | SEQ. ID NO: 237 |
| | VIPS_HUMAN VASOACTIVE | | | | |
| | INTESTINAL POLYPEPTIDE | | | | |
| | RECEPTOR 2 PRECURSOR | | | | |
| | [H. sapiens] | | | | |
| Hs.152531 | HAND1 Heart and neural crest | Neuroblastoma, Schwannoma, germ cell tumors | | SEQ. ID NO: 238 | SEQ. ID NO: 239 |
| | derivatives expressed 1 | sarcoma | | | |
| Hs.153444 | POM62 | Lung carcinoid tumors, breast carcinoma | | SEQ. ID NO: 240 | SEQ. ID NO: 241 |
| Hs.352562 | POM63, | Teratocarcinoma, laposarcoma, | | SEQ. ID NO: 242 | SEQ. ID NO: 243 |
| | Homo sapiens cDNA FLJ33010 | pheochromocytoma, lung carcinoma, cervical | | | |
| | is, clone THYMU1000336 | carcinoma, chondrosarcoma, breast carcinoma, | | | |
| | UniGene cluster identifier | leiomioma, lymphoma, uterus tumor, head and | | | |
| | Hs.154173 has been retired | neck carcinomar, colon carcinoma, breast | | | |
| | current cluster Hs.352562 | carcinoma, melanoma, skin carcinoma, | | | |
| | | prostate tumor | | | |
| Hs.155981 | MSLN Mesothelin | Pancreas, prostate, cervical, liver, uterus, | KNOWN TUMOR | SEQ. ID NO: 244 | SEQ. ID NO: 245 |
| | | colon, stomach, head and neck and lung | MARKER FOR | | |
| | | carcinomas, choriocarcinoma, glioma, | CARCINOMAS | | |
| | | ovarian and uterus tumors, chondrosarcoma | | | |
| Hs.156213 | POM64 | Lung carcinoid tumors, head and neck | | SEQ. ID NO: 246 | SEQ. ID NO: 247 |
| | | carcinoma, colon carcinoma | | | |
| Hs.156499 | POM65 | Uterus tumors, Lymhomas and leukemias | | SEQ. ID NO: 248 | SEQ. ID NO: 249 |
| Hs.156637 | CBLC Cas-Br-M (murine) | stomach, lung, breast, colon, lung pancreas | | SEQ. ID NO: 250 | SEQ. ID NO: 251 |
| | ectropic retroviral | and head and neck carcinomas, glioma, | | | |
| | transforming sequence c | choriocarcinoma Uterus and carcinoid tumors | | | |
| Hs.156762 | POM66 | germ cell tumors | | SEQ. ID NO: 252 | SEQ. ID NO: 253 |
| Hs.156810 | POM67 Weakly similar to | Uterus carcinoma | | SEQ. ID NO: 254 | SEQ. ID NO: 255 |
| | EF11_HUMAN ELONGATION FACTOR | | | | |
| | 1-ALPHA 1 [H.sapiens] | | | | |
| Hs.156813 | POM6B (MGC10600) predicted | Melanoma, choriocarcinoma, germ cell tumor | | SEQ. ID NO: 256 | SEQ. ID NO: 257 |
| | protein MGC10600 | | | | |
| Hs.156843 | POM69 | Lung carcinoid tumors, germ cell tumors, | | SEQ. ID NO: 258 | SEQ. ID NO: 259 |
| | | melanoma | | | |
| Hs.156905 | KIAA1676 | germ cell and lung carcinoid tumors, Ewing's | | SEQ. ID NO: 260 | SEQ. ID NO: 261 |
| | | sarcoma, ovary, adrenal cortex and uterus | | | |
| | | carcinomas, retinoblastoma | | | |
| Hs.157205 | BCAT1 Branched chain | germ cell tumors, lung carcinoma, glioma, | | SEQ. ID NO: 262 | SEQ. ID NO: 263 |
| | aminotransfe-rase 1, | lymphoma, teratocarcinoma, rhabdomyosarcoma, | | | |
| | cytosolic | lung carcinoma, embryonal carcinoma, uterus | | | |
| | | tumor | | | |
| Hs.79707 | TNFRSF19L Tumor necrosis | Colon carcinoma, glioma, B-cell chronic | | SEQ. ID NO: 264 | SEQ. ID NO: 265 |
| | factor receptor superfamily, | lymphocytic leukemia, ovary tumors, germ | | | |
| | member 19-like | cell tumors, chondrosarcoma, neuroblastoma, | | | |
| | UniGene cluster indentifier | melanoma, stomach carcinoma, | | | |
| | Hs.158218 has been retired | leiomyosarcoma, renal cell carcinoma, uterus | | | |
| | now Hs.79707 | carcinoma, lung carcinoma, lymphoma, pre-B | | | |
| | | cell acute lymphoblastic leukemia | | | |
| Hs.158333 | PRSS7 Protease, serine, 7 | Glioma, breast carcinoma | | SEQ. ID NO: 266 | SEQ. ID NO: 267 |
| | (enterokinase) | | | | |
| Hs.158460 | CDK5R2 Cyclin-dependent | germ cell tumors, lung carcinoid tumors, | | SEQ. ID NO: 268 | SEQ. ID NO: 269 |
| | kinase 5, regulatory subunit | glioma, adrenal cortex carcinoma, lung | | | |
| | 2 (p39) | carcinoma, neuroblastoma | | | |
| Hs.158521 | POM70 | Kidney tumors, breast carcinoma | | SEQ. ID NO: 270 | SEQ. ID NO: 271 |
| Hs.160724 | POM71 | glioma, lung carcinoid tumors | | SEQ. ID NO: 272 | SEQ. ID NO: 273 |
| Hs.162717 | P0M72, | Choriocarcinoma, neuroblastoma, placenta | | SEQ. ID NO: 274 | SEQ. ID NO: 275 |
| | (MGC15668) Hypothetical | tumor, lung, colon, stomach carcinomas germ | | | |
| | protein MGC15668 | cell tumors, burkitt lymphoma, | | | |
| Hs.236510 | TPARL TPA regulated locus | Melanoma, rhabdomyosarcoma, renal cell | | SEQ. ID NO: 276 | SEQ. ID NO: 277 |
| | | carcinoma, mucoepidermoid carcinoma, uterus | | | |
| | | carcinoma, B-cell chronic lymphotic | | | |
| | | leukemia, colon carcinoma, lymphoma, ovary | | | |
| | | fibrotheoma, lung carcinoma, kidney tumor, | | | |
| | | breast carcinoma, glioma, parathyroid tumor, | | | |
| | | germ cell tumors, liposarcoma, thyroid | | | |
| | | tumor, lung carcinoid tumors, liposarcoma, | | | |
| | | small intestine duodenal carcinoma, | | | |
| | | genitourinary tract | | | |
| | | transitional cell tumors, head and neck | | | |
| | | carcinoma, melanoma, endometrium carcinoma, | | | |
| | | adrenal cortex carcinoma, osteosarcoma, oral | | | |
| | | carcinoma, synovial sarcoma, lung carcinoma, | | | |
| | | renal cell carcinoma, chondrosarcoma, breast | | | |
| | | carcinoma, melanoma, meningioma, lymphoma, | | | |
| | | chronic myelogenous leukemia, embryonal cell | | | |
| | | carcinoma | | | |
| Hs.356072 | POM73, Moderately similar to | Lung carcinoid tumors, Lung carcinoma | | SEQ. ID NO: 278 | SEQ. ID NO: 279 |
| | POL2_HUMAN RETROVIRUS-RELATED | | | | |
| | POL POLYPROTEIN [H.sapiens] | | | | |
| Hs.336963 | EVX1 Eve, even-skipped homeo | Colon carcinoma | | SEQ. ID NO: 280 | SEQ. ID NO: 281 |
| | box homolog 1 (Drosophila) | | | | |
| Hs.170046 | POM74 | Ovary carcinoma | | SEQ. ID NO: 282 | SEQ. ID NO: 283 |
| Hs.170482 | MYL5 Myosin, light | Ovary tumors, glioma, lung carcinoma, breast | | SEQ. ID NO: 284 | SEQ. ID NO: 285 |
| | polypeptide 5, regulatory | colon and pancreatic carcinoma, kidney | | | |
| | | tumors, leiomyosarcoma, uterus tumors | | | |
| Hs.170993 | POM75 | Kidney tumors, prostatic carcinoma | | SEQ. ID NO: 286 | SEQ. ID NO: 287 |
| Hs.172330 | POM76 | cervical, lung and breast carcinoma, | | SEQ. ID NO: 288 | SEQ. ID NO: 289 |
| | (MGC2705) predicted MGC2705 | retinoblastoma, melanoma, laiomyosarcoma, | | | |
| | | Wilms tumor, breas rhabdomyosarcoma, acute | | | |
| | | myalogenous leukemia, burkitt lymphoma | | | |
| Hs.172603 | POM77 | prostate carcinoma | | SEQ. ID NO: 290 | SEQ. ID NO: 291 |
| Hs.330485 | POM78 | Ovary carcinoma | | SEQ. ID NO: 292 | SEQ. ID NO: 293 |
| Hs.180142 | CLSP Calinodulin-like skin | Skin carcinoma, breast carcinoma, lung | | SEQ. ID NO: 294 | SEQ. ID NO: 295 |
| | protein | carcinoma | | | |
| Hs.328801 | POM79 | Lung carcinoma, breast carcinoma | | SEQ. ID NO: 296 | SEQ. ID NO: 297 |
| Hs.181654 | POM80 | Lung carcinoid tumors, kidney tumors | | SEQ. ID NO: 298 | SEQ. ID NO: 299 |
| Hs.1823E2 | POM90 | ovarian carcinoma, kidney tumors | | SEQ. ID NO: 300 | SEQ. ID NO: 301 |
| Hs.185831 | POM91 | Prostate, stomach and bladder carcinoma | | SEQ. ID NO: 302 | SEQ. ID NO: 303 |
| Hs.189358 | POM92 | lung carcinoid tumors, germ cell tumors, | | SEQ. ID NO: 304 | SEQ. ID NO: 305 |
| | | breast carcinoma | | | |
| Hs.190488 | POM93 | Skin squamous cell carcinoma, stomach | | SEQ. ID NO: 306 | SEQ. ID NO: 307 |
| | (Homo sapiens mRNA; cDNA | carcinoma, colon carcinoma, parathyroid | | | |
| | DKFZpE667M2411 (from clone | tumor, lung carcinoid tumors, glioma, breast | | | |
| | DKFZpE667M2411) | carcinoma, lymphoma, melanoma, uterus | | | |
| | | carcinoma, prostate carcinoma, | | | |
| | | chondrosarcoma, retinoblastoma, cervical | | | |
| | | carcinoma, renal carcinoma, head and neck | | | |
| | | carcinoma, chronic myelogenous leukemia, | | | |
| | | hypernephroma, uterus carcinoma, leiomioma | | | |
| Hs.191574 | POM94 | Pancreas carcinoma, parathyroid tumor, ovary | | SEQ. ID NO: 308 | SEQ. ID NO: 309 |
| | (Homo sapiens cDMA FLJ13050 | tumors, teratocarcinoma, acute myelogenous | | | |
| | fis, clone NT2RP3001432) | leukemia, lung carcinoid tumors, | | | |
| | | hypernephroma, head and neck carcinoma, | | | |
| | | melanoma | | | |
| Hs.193677 | ZNF141 Zinc finger protein | Retinoblastoma, lung carcinoid tumors, | | SEQ. ID NO: 310 | SEQ. ID NO: 311 |
| | 141 (clone pHZ-44) | hypernaphroma, glioma, head and neck | | | |
| | | carcinoma ovary tumors, leiomioma | | | |
| Hs.195081 | POM95 | germ cell tumors | | SEQ. ID NO: 312 | SEQ. ID NO: 313 |
| Hs.195374 | POM96 | germ cell tumors, B-cell chronic lymphotic | | SEQ. ID NO: 314 | SEQ. ID NO: 315 |
| | | leukemia, kidney tumor, uterus tumors | | | |
| Hs.195641 | POM97 | Uterus carcinoma, Lung carcinoma, colon | | SEQ. ID NO: 316 | SEQ. ID NO: 317 |
| | | carcinoma, nervous cell tumors, breast | | | |
| | | carcinoma, stomach carcinoma | | | |
| Ha.196073 | POM98 | Lung carcinoma, germ cell tumors, stomach | | SEQ. ID NO: 318 | SEQ. ID NO: 319 |
| | | carcinoma, genitourinary tract transitional | | | |
| | | cell carcinoma | | | |
| Hs.199460 | DPCR1 DPCR1 protein | Pancreas carcinoma, stomach carcinoma | | SEQ. ID NO: 320 | SEQ. ID NO: 321 |
| Hs.202247 | POM99 | lung carcinoid tumors | | SEQ. ID NO: 322 | SEQ. ID NO: 323 |
| Hs.202512 | POM100 | lung carcinoid tumors, colon carcinoma | | SEQ. ID NO: 324 | SEQ. ID NO: 325 |
| Hs.202577 | POM101 (Homo sapiens cDNA | Schwannoma, lung carcinoid tumors, germ cell | | SEQ. ID NO: 326 | SEQ. ID NO: 327 |
| | FLJ12166 fis, clone | tumors, lymphoma, colon carcinoma, glioma | | | |
| | MAMMA1000616) | | | | |
| Hs.202612 | POM102 | Lung carcinoma, colon carcinoma | | SEQ. ID NO: 328 | SEQ. ID NO: 329 |
| Hs.209560 | POM103 | Lung carcinoma, embryonal cell carcinoma, | | SEQ. ID NO: 330 | SEQ. ID NO: 331 |
| | | pituitary tumor | | | |
| Hs.209646 | POM104 | Lung carcinoma, choriocarcinoma, melanoma | | SEQ. ID NO: 332 | SEQ. ID NO: 333 |
| | (KIAA1118) | glioblastoma, neuroblastoma, osteosarcoma, | | | |
| | KIAA1118 protein | colon carcinoma, breast carcinoma, lymphoma, | | | |
| | | glioma, retinoblastoma | | | |
| Hs.211238 | IL-1H1 Interleukin-1 homolog | colon carcinoma, head and neck carcinoma | | SEQ. ID NO: 334 | SEQ. ID NO: 335 |
| | 1 | | | | |
| Ha.217766 | POM105 | Ovary carcinoma | | SEQ. ID NO: 336 | SEQ. ID NO: 337 |
| Hs.217882 | POM106 | glioma, colon carcinoma, kidney tumors, | | SEQ. ID NO: 338 | SEQ. ID NO: 339 |
| | | prostate tumors, lung | | | |
| | | carcinoma, hypernephroma, head and neck | | | |
| | | carcinoma, duodenal carcinoma, melanoma, | | | |
| | | pancreatic carcinoma, uterus tumors | | | |
| Hs.220529 | CEACAM5 Carcinoembryonic | Pancreas carcinoma, colon carcinoma, stomach | KNOWN TUMOR | SEQ. ID NO: 340 | SEQ. ID NO: 341 |
| | antigen-related cell adhesion | carcinoma, head and neck carcinoma, lung | MARKER | | |
| | molecule 5 | carcinoma leiomioma, breast carcinoma | | | |
| Hs.222056 | POM107 Homo sapiens cDNA | Stomach carcinoma, head and neck | | SEQ. ID NO: 342 | SEQ. ID NO: 343 |
| | FLJ11572 fis, clone | carcinoma, breast carcinoma | | | |
| | HEMBA1003373 | | | | |
| Hs.225083 | POM108 | Melanoma, ovary tumors, colon carcinoma, | | SEQ. ID NO: 344 | SEQ. ID NO: 345 |
| | | parathyroid tumor, kidney tumors, head and | | | |
| | | neck carcinoma | | | |
| Hs.227098 | GCMB Glial cells missing | perathyroid_tumor | | SEQ. ID NO: 346 | SEQ. ID NO: 347 |
| | homolog b (Drosophila) | | | | |
| Hs.239107 | POM109 | Lymphoma, germ cell tumors, head and neck | | SEQ. ID NO: 348 | SEQ. ID NO: 349 |
| | | carcinoma | | | |
| Hs.239891 | GPR35 G protein-coupled | B-cell chronic lymphocytic leukemia, colon | SURFACE | SEQ. ID NO: 350 | SEQ. ID NO: 351 |
| | receptor 35 | carcinoma, pancreas and carcinoma | | | |
| HS.241381 | CRSP7 Cofactor required for | Pancreatic carcinoma, duodenal carcinoma, | | SEQ. ID NO: 352 | SEQ. ID NO: 353 |
| | Sp1 transcriptional | ovary carcinoma, melanoma, osteosarcoma, | | | |
| | activation, subunit 7 (70kD) | glioma, leiomyosarcoma, germ cell tumors | | | |
| Hs.241407 | SERPINB13 Serine (or | ORAL carcionoma, cervical carcinoma, head | | SEQ. ID NO: 354 | SEQ. ID NO: 355 |
| | cysteine) proteinase | and neck carcinoma | | | |
| | inhibitor, clade B | | | | |
| | (ovalbumin), member 13 | | | | |
| Hs.243920 | POM110 | Pancreas carcinoma | | SEQ. ID NO: 356 | SEQ. ID NO: 357 |
| Hs.244378 | SLC2A6 Solute carrier family | Hypernephroma, pancreatic carcinoma, gliona, | | SEQ. ID NO: 358 | SEQ. ID NO: 359 |
| | 2 (facilitated glucose | lung carcinoma, neuroblastoma, renal cell | | | |
| | transporter), member 6 | carcinoma, adrenal gland tumors | | | |
| Hs.246781 | POM111 | parathyroid_tumor, lung carcinoid tumors, | | SEQ. ID NO: 360 | SEQ. ID NO: 361 |
| | | germ cell tumors, hepatocellular carcinoma, | | | |
| | | stomach carcinoma, breast carcinoma | | | |
| Hs.247817 | H2B/S Histone family member A | Breast carcinoma, chronic myelogerious | | SEQ. ID NO: 362 | SEQ. ID NO: 363 |
| | | leukemia, cervical carcinoma, melanoma, | | | |
| | | ovary carcinoma, lung carcinoma, | | | |
| | | osteosarcoma, mucoepidermoid carcinoma, | | | |
| | | duodenal carcinoma, leiomyosarcoma, glioma, | | | |
| | | prostate carcinoma, kidney tumors, colon | | | |
| | | carcinoma, prostatic intraepithelial | | | |
| | | neoplasia, lymphoma, uterus carcinoma, | | | |
| | | parathyroid tumor, insulinoma, | | | |
| | | chondrosarcoma, ovary tumors, multiple | | | |
| | | myeloma, chondrosarcoma, bladder tumors, | | | |
| | | parathyroid tumors, insulinoma, breast | | | |
| | | carcinoma, pnet tumors, | | | |
| Hs.250158 | POM112 | Head and neck carcinoma, stomach carcinoma, | | SEQ. ID NO: 364 | SEQ. ID NO: 365 |
| | | colon carcinoma | | | |
| Hs.250848 | Pom113Homo sapiens cDNA | Uterus carcinoma, prostate tumor, glioma, | | SEQ. ID NO: 366 | SEQ. ID NO: 367 |
| | FLJ14761 fis, clone | duodenal carcinoma, colon carcinoma, glioma, | | | |
| | NT2RP3003302 | stomach carcinoma, Germ cell tumors, lung | | | |
| | | carcinoma, embryonal cell carcinoma, breast | | | |
| | | carcinoma, choriocarcinoma | | | |
| Hs.252351 | HHLA2 HERV-H LTR-associating | Colon carcinoma, kidney tumors, ovary | | SEQ. ID NO: 368 | SEQ. ID NO: 369 |
| | 2 | tumors, Stomach tumors, prostate carcinoma, | | | |
| Hs.253298 | POM114 | Head and neck carcinoma, germ cell tumors | | SEQ. ID NO: 370 | SEQ. ID NO: 371 |
| Hs.254379 | POM115 | Ovary carcinoma | | SEQ. ID NO: 372 | SEQ. ID NO: 373 |
| Hs.255877 | POM116 | Leukemia | | SEQ. ID NO: 374 | SEQ. ID NO: 375 |
| Hs.266390 | POM117 | Lung carcinoid tumors, pre-B cell acute | | SEQ. ID NO: 376 | SEQ. ID NO: 377 |
| | | lymphoblastic leukemia, ovarian carcinoma | | | |
| Hs.268171 | POM118 | Nervous cell tumors, germ cell tumors, | | SEQ. ID NO: 378 | SEQ. ID NO: 379 |
| | | prostatic intraepithelial neoplasia, ovary | | | |
| | | tumors | | | |
| Hs. 106823 | STX12 Syntaxin 12 | Bladder carcinoma, colon carcinoma, | | SEQ. ID NO: 380 | SEQ. ID NO: 381 |
| | and | lymphoma, prostate carcinoma, pancreas | | SEQ. ID NO: 382 | SEQ. ID NO: 383 |
| | MGC14797 Flypothetical protein | carcinoma, breast carcinoma, Wilms' tumor | | | |
| | MGC14797 | uterus carcinoma, meningioma, kidney | | | |
| | | tumors, lung carcinoma, stomach carcinoma | | | |
| | | parathyroid tumor, germ cell tumors, ovary | | | |
| | | tumors, B-cell chronic lymphocytic leukemia, | | | |
| | | germ cell tumors, thyroid tumor, | | | |
| | | leiomyosarcoma, duodenal carcinoma, | | | |
| | | pancreatic carcinoma, alveolar | | | |
| | | rhabdomyosarcoma, glioma, head and neck | | | |
| | | carcinoma, bladder transitional cell | | | |
| | | papilloma, retinoblastoma, chondrosarcoma | | | |
| | | Stomach carcinoma, pre-B call acute | | | |
| | | lymphoblastic leukemia, lung carcinoma, | | | |
| | | hepetocellular carcinoma, melanoma, | | | |
| | | fibrosarcoma, lymphoma, chondrosarcoma, | | | |
| | | osteosarcoma, hepatocellular carcinoma, | | | |
| | | burkitt lymphoma, uterus carcinoma | | | |
| Hs.355428 | Pom119, Weakly similar to | Pancreas carcinoma, glioma, breast | | SEQ. ID NO: 384 | SEQ. ID NO: 385 |
| | B34087 Predicted protein | carcinoma, lung carcinoid tumors, Ewing's | | | |
| | [H.sapiens] | sarcoma, colon carcinoma, melanoma, lung | | | |
| | | carcinoma, head and neck carcinomar, ovary | | | |
| | | carcinoma, pnet tumor | | | |
| Hs.272216 | GPE Glycoprotein VI | Rhabdomyosarcoma, colon carcinoma, head and | | SEQ. ID NO: 386 | SEQ. ID NO: 387 |
| | (platelet) | neck carcionoma, epidydimal tumors, nervous | | | |
| | | cell tumors | | | |
| Hs.272499 | DHRS2 Dehydroganase/reductase | Bladder transitional cell papilloma, | | SEQ. ID NO: 388 | SEQ. ID NO: 389 |
| | (SDR family) member 2 | melanoma, colon carcinoma, hepatocellular | | | |
| | | carcinoma, endometrial carcinoma, lung | | | |
| | | carcinoid tumors, colon carcinoma, | | | |
| | | Lymphoma, fibrosarcoma, kidney_tumor, | | | |
| | | meningioma, genitourinary tract transitional | | | |
| | | cell tumors, fibrosarcoma, Stomach tumor, | | | |
| | | breast carcinoma, | | | |
| Hs.273625 | POM120 | Stomach carcinoma | | SEQ. ID NO: 390 | SEQ. ID NO: 391 |
| Hs.278291 | POM121 Weakly similar to | endometrial carcinoma | | SEQ. ID NO: 392 | SEQ. ID NO: 393 |
| | 810024J URF 4 [H.sapiens] | | | | |
| Hs.279805 | POM122 | Lung carcinoid tumors, nervous cell tumors, | | SEQ. ID NO: 394 | |
| | | pnet tumor, | | | |
| Hs.280146 | POM123 Weakly similar to L1 | Lung carcinoid and ovarian tumorsm glioma | | SEQ. ID NO: 395 | |
| | repeat, Tf subfamily, member | | | | |
| | 18 [Mus musculus] | | | | |
| Hs.109274 | Pom124 | Lung carcinoma, stomach carcinoma, colon | | SEQ. ID NO: 396 | SEQ. ID NO: 397 |
| | MGC4365 Predicted protein | carcinoma, breast carcinoma, glioma, kidney | | | |
| | MGC4365 | tumors, melanoma, choriocarcinoma, t- cell | | | |
| | | leukemia, cervical carcinoma, | | | |
| | | neuroblastoma, retinoblastoma, multiple | | | |
| | | myeloma, ovary carcinoma, pre-B cell acute | | | |
| | | lymphoblastic leukemia, uterus carcinoma, | | | |
| | | kidney tumors, lung carcinoma, endometrial | | | |
| | | carcinoma, renal cell carcinoma, acute | | | |
| | | myelogenous leukemia cell, cervical carcinoma | | | |
| Hs.282050 | POM125 | Prostate carcinoma, embryonal cell | | SEQ. ID NO: 398 | SEQ. ID NO: 399 |
| | Homo sapiens cDNA FLJ31265 | carcinoma, ovary carcinoma, kidney tumors, | | | |
| | fis, clone KIDNEY2006030, | colon carcinoma, germ cell tumors, | | | |
| | moderately similar to Gallus | neuroblastoma, retinoblastoma, melanoma, | | | |
| | gallus syndesmos mRNA | breast carcinoma, ovary tumors, renal cell | | | |
| | | carcinoma, endometrium carcinoma, | | | |
| | | leiomyosarcoma, glioma, head and neck | | | |
| | | carcinoma, nervous cell tumors, | | | |
| | | neuroblastoma, cervical carcinoma, leukemia, | | | |
| | | ovarian carcinoma, head and neck tumors, | | | |
| Hs.284203 | MYOD1 Myogenic factor 3 | Rhabdomyosarcoma, burkitt lymphoma | | SEQ. ID NO: 400 | SEQ. ID NO: 401 |
| Es.285026 | HHLA1 HERV-H LTR-associating | Colon carcinoma | | SEQ. ID NO: 402 | SEQ. ID NO: 403 |
| | 1 | | | | |
| Hs.285887 | POM12E Weakly similar to | hepatocellular carcinoma | | SEQ. ID NO: 404 | SEQ. ID NO: 405 |
| | 2109260A B cell growth factor | | | | |
| | [H. sapiens] | | | | |
| Hs.285894 | POM127 | hepatocellular carcinoma | | SEQ. ID NO: 406 | SEQ. ID NO: 407 |
| Hs.288568 | POM128 | Stomach carcinoma | | SEQ. ID NO: 408 | SEQ. ID NO: 409 |
| | FLJ22644 Predicted | | | | |
| | protein FLJ22644 | | | | |
| Hs.288842 | OPA3 Optic atrophy 3 | Lymphoma, kidney renal cell carcinoma, lung | | SEQ. ID NO: 410 | SEQ. ID NO: 411 |
| | (autosomal recessive, with | small cell carcinoma, pancreas carcinoma, | | | |
| | chorea and spastic | choriocarcinoma, | | | |
| | paraplegia) | Melanoma, retinoblastoma, leiomyosarcoma, | | | |
| | | prostate carcinoma, head and neck carcinoma, | | | |
| | | parathyroid tumor, choriocarcinoma | | | |
| Hs.290308 | POM129 | ovarian carcinoma, glioma, hepatocellular | | SEQ. ID NO: 412 | SEQ. ID NO: 413 |
| | | carcinoma, breast carcinoma, head and neck | | | |
| | | carcinoma, insulinoma, retinoblastoma | | | |
| Hs.293678 | TCBAP075B Predicted | Retinoblastoma, leiomyosarcoma, lymphoma, | | SEQ. ID NO: 414 | SEQ. ID NO: 415 |
| | protein TCBAP0758 | neuroblastoma, glioma, cervical carcinoma, | | | |
| | | pancreas carcinoma, germ cell tumors, | | | |
| | | stomach carcinoma, glioma, uterus carcinoma, | | | |
| | | lung carcinoid tumors, adrenal cortex | | | |
| | | carcinoma, ovary tumors, melanoma, | | | |
| | | lymphoblastic leukemia, colon cancer, | | | |
| | | endometrial carcinoma, neuroblastoma, breast | | | |
| | | carcinoma, head and neck neck carcinoma, | | | |
| | | nervous cell tumors, lung carcinoma, Wilms' | | | |
| | | tumor, pancreas carcinoma | | | |

[0118] Of the tumor associated EST's detected by the methods of the present invention, a particularly interesting group are the clusters represented by EST's found exclusively in tumor derived libraries. One striking feature of these tumor markers is their frequent occurrence in colon, lung and ovarian carcinomas. Thus, the high percentage of tumor-specific EST's is characteristic of highly malignant tumors (e.g. ovary carcinomas, metastatic breast carcinomas and small cell lung tumors. Accordingly, the methods of the present invention provide a method for predicting malignancy of a tumor based on the percentage of tumor-specific EST expression detected in such tumors. Utilizing standard molecular biology techniques as exemplified below, for example, persons of ordinary skill in the art can utilize probes for tumor associated EST's to determine the level of malignancy in a tumor tissue sample.

[0119] All three colon-specific clusters detected with the methods of the present invention represented known genes which encode apolipoprotein B mRNA editing protein APOBEC1, guanylate cyclase 2C and G protein coupled receptor 35. Both APOBEC1 and guanylate cyclase 2C mRNAs have been shown to be overexpressed in colon carcinomas (Lee et al, Gastroenterology 115(5):1096-1103 (1998); Carithers et al. Proc.Natl. Acad. Sci. USA 93(25):14827-32 (1996). Moreover, high level expression of APOBEC1 in transgenic mice and rabbit livers causes liver dysplasia and hepatocellular carcinomas and guanylate cyclase 2C appears to be relatively specific marker for the presence of metastatic colonic carcinoma cells. These observations, together with the appearance of the guanylate cyclase 2C in tumor specific clusters, indicate that this gene is a putative marker of progression of colon cancer.

### EXAMPLE 2

[0120] In order to detect the presence of a tumor associated EST in actual tissue samples, biological samples were prepared and analyzed for the presence or absence of the EST sequence. In each case, where clusters are defined by a plurality of sequences, the probes utilized are derived from the longest reported sequence for the cluster. Individual subsets of EST clusters predicted to be tumor associated with the methods of the present invention were analyzed in polymerase chain reaction studies on Clontech multiple tissues cDNA (MTC) panels and on panels of genomic DNA from different animal species. Gene or gene fragments corresponding to EST clusters Hs.133107, Hs.154173 and Hs.67624 according to our computational differential display studies were expressed only in tumors. Hs.133244 was expressed in a variety of tumors and was also expressed at very low levels in normal testis and germinal B-cells. Initially, the screening method involved a non-PCR based strategy. Such screening methods include two-step label amplification methodologies that are well known by persons of ordinary skill in the art. Both PCR and non-PCR based screening strategies can also detect target sequences with a high level of sensitivity.

[0121] A subset of EST clusters found by HSAnalyst software was analyzed by both confirmatory PCR on Clontech Multiple Tissue cDNA Panels. PCR Amplification of the tumor associated EST Hs.133294 Fragment was analyzed in Human Tumor MTC Panel 1 and 2, Human Immune System MTC Panel, Human Fetal MTC Panel, DNA from Different Animal species, and Southern hybridization of Hs.133294 fragment with genomic DNA from different animal species digested to completion with EcoR I. Hs.133294 represents an EST protein-encoding mRNA located on chromosome 1q21. It is weakly similar in homology to IQGA (human RAS GTPase-activating-like protein IQGAP1). Hs.133294 was represented in: prostate tumor, HNSCC, breast carcinoma, oligodendroglioma, colon carcinoma, CML, lung carcinoma, ovarian carcinoma, uterus carcinoma, adrenal adenoma and <<minor occurrences>> in normal testis and germinal B-cells. One EST in the cluster was derived from normal testis, one from germinal B-cells and twenty-five from different tumors. Both testis and germinal B-cells as tissues are known to express tumor markers, e.g. cancer-testis antigen family members are expressed only in testis in a healthy organism, but testis expression does not interfere with the tumor marker features of such a genes. Unlike in the case of the other examples contained herein, where primers were selected from the same exon, in this case primers belong to two different exons separated by intron 672 bp in size. That is why two fragments may be considered as specific to Hs.133294: a 1084 bp fragment which corresponds to unspliced mRNA and a 412 bp fragment corresponding to spliced mRNA. PCR on human tumor MTC panel produced the 1084 bp fragment on cDNAs from all eight tumors comprising the panel. The 412 bp fragment was not generated in samples from prostatic adenocarcinoma, lung carcinoma and colon adenocarcinoma propagated as xenografts in athymic nude mice. The 412 bp fragment was generated in lung carcinoma and colon adenocarcinoma which have been taken as surgical explants from metastasis and primary tumor. PCR of cDNA from testis generated the 412 bp fragment detected in normal human MTC panels 1 and 2 and weak detection of the 1084 bp fragment. No fragments were produced on human immune system MTC panel. But on human fetal MTC panel both 1084 bp and 412 bp fragments were amplified in cDNAs from all organs and/or tissues represented in the panel. One thousand eighty four base pairs fragment corresponding to unspliced mRNA was detected in all lanes in relatively greater amounts than the 412 bp fragment. The weakest signals for both fragments were detected for fetal brain and heart.

### EXAMPLE 3

[0122] Utilizing similar methods as in Example 2, Hs.154173, a non-coding mRNA with tumor expression located in the intergenic spacer region within the rRNA encoding unit and is represented in lung carcinoma and testicular teratocarcinoma was analyzed for expression in the various tissue panels as in Example 2. PCR testing with Hs.154173 specific primers on human tumor MTC panel resulted in amplification of an Hs.154173-specific fragment of 443 bp in the lanes corresponding to breast carcinoma and pancreatic adenocarcinoma. There was also a weak band in the lane that corresponded to prostatic adenocarcinoma.

[0123] In contrast, PCR analysis with the same Hs.154173-specific primers on normal human MTC panels 1 and 2, on human immune system MTC panel and human fetal MTC panel demonstrated no amplification of the corresponding fragment in any of 31 normal tissues cDNA comprising these four normal panels, indicating that this fragment is not expressed in these tissues.

### EXAMPLE 4

[0124] Hs.67624 is a tumor-associated non coding mRNA located on Chromosome 3 and represented in germ cell tumors and head and neck squamous cell carcinoma. The results of PCR amplification of the tumor associated EST Hs.67624 fragment in Human Tumor MTC Panel 1 and 2, Human Immune System MTC Panel, Human Fetal MTC Panel, DNA from different animal species, and Southern hybridization of Hs.67624 fragment with genomic DNA from different animal species on genomic DNA digested to completion with EcoRI. These results confirmed that HS 67624 as a tumor associated EST expressed in ovarian carcinoma. There are three human tissues that often express tumor antigens. These are thymus, testis and embryonic tissues. PCR with Hs.67624-specific primers on human tumor MTC panel resulted in predicted amplification of 315 bp Hs.67624-specific fragment in ovarian carcinoma. PCR with the same Hs.67624 primers on normal human MTC panels 1 and 2 resulted in no fragments on any of 16 normal cDNA libraries comprising these panels. PCR on human immune system MTC panel and human fetal MTC panel produced signals corresponding to 315 bp fragment only on cDNA from thymus. The signal in fetal thymus was considerably stronger than for normal thymus.

### EXAMPLE 5

[0125] Hs.133107 is a tumor associated non-coding mRNA located on chromosome 12p13. The results of PCR Amplification of the EST Hs.133107 fragment in Human Tumor MTC Panel 1 and 2, Human Immune System MTC Panel, Human Fetal MTC Panel. These results confirmed that Hs.133107 as a tumor related EST. PCR on normal Human MTC Panels 1 and 2 produced no fragments on any of cDNA from 16 normal tissues. PCR on human immune system MTC panel resulted in amplification of 344 bp fragment on cDNA from lymph node. PCR on human fetal MTC panel did not result in any fragments.

### EXAMPLE 6

[0126] The results of PCR Amplification of the a nucleic acid specific for Glucose 3 phosphate dehydrogenase fragment in Human Tumor MTC Panel 1 and 2, Human Immune System MTC Panel, Human Fetal MTC Panel and DNA from different animal species was performed as in the above examples. This control demonstrated that mRNA specific for Glucose 3 phosphate dehydrogenase could be detected in a manner consistent with known expression patterns of this gene.

### EXAMPLE 7

[0127] The methods of the present invention were used to detect differential expression of genes expressed in hyperosmotic stress (caused by NaCl), or dehydration in the plant Arabidopsis thaliana. Despite the relatively small number of ESTs and UNIGENE clusters available for this organism, 5 stress-associated clusters were detected using the methods of the present invention. Three stress-associated clusters detected in A. thaliana represented known plant genes involved in stress response: GST30, Lti30 and cor15-encoding gene. The remaining clusters represented unknown genes. The applicability of the methods of the present invention to A. thaliana provides a prognostic model useful to determine if the relevant genes found in A. thaliana can be used as a hybridization templates to find orthologs in other agricultural plants and such orthologs will be useful for gene targeting etc in such important plants.

[0128] Utilizing the methods of the present invention, a database “AT Lib Registry” was constructed. This database contained descriptions of all cDNA expression libraries used to build an EST database for A. thaliana. Computer-based methods were used to determine mRNA sequences differentially expressed in plants under different physiological conditions including oxidative, herbicidal and other stress types. The CDD permitted an analysis of the absolute number of nucleotide sequences synthesized for transcription matrices of every type of interest in discovered samples. The CDD analysis utilized data from databases such as dbEST containing more than 110 000 EST sequences that were deduced from cDNA libraries made from A. thaliana cells. For every sequence in the database there was a description of source cDNA library provided. These data and the EST clustering information complete the dataset needed to describe a tissue-associated (or condition-associated) expression of transcripts of every type (or genes). The processing of large volumes of EST information was facilitated by means of a variation of the Hs.Analyst software utilized for determination of tumor-associated markers wherein the variation utilized the Hs.Analyst main module and an Arabidopsis LibRegistry, dividing the Arabodopsis.libraries according to stress/non-stress categories.

[0129] The software At_Analyst was utilized to analyze EST clustering data of the model plant Arabidopsis thaliana and to conduct a comparative analysis of gene expression spectra in different tissues of the plant. In this example, all data sources were divided into 3 classes named “target1”, “target2” and “undefined”, whereas the last class pooled data were not entered in either of first two classes.

[0130] At_Analyst software description. In this example, the source data for the program were arranged in two plain text files designated “at.data” and “libraries”. The file “at.data” contained cluster descriptions arranged according to individual clusters. All fields were listed each in a separate line for each EST. Each cluster description with a field “ID” which contained the internal UniGene cluster index, the cluster gene “title” and gene name if there was significant known homology of a cluster to a known gene, the number of sequences of any type (mRNA, protein, cDNA) included in cluster and lines containing information about all individual sequences of the cluster. For each sequence there was provided a LID (Library ID) which data field was LID used to retrieve information about the EST source library, thereby allowing association of the EST sequence with a particular physiological state or growth condition.

[0131] The database “At Library Registry” was created. This database included all source cDNA clone library descriptions of 71 libraries prepared from different parts or tissues of A. thaliana. Every record consisted of the following fields: 1) library ID in dbEST database; 2) library name; 3) tissue source of mRNA used to prepare cDNA sequences and additional comments concerning library construction methods and physiological conditions of plant growth; 4) organism name (A. thaliana in the present example); 5) organism strain or ecotype; and 6) cloning vector used for library construction. In general, source tissues were derived from A. thaliana strains Columbia Col-0, Columbia C24, Columbia GH50, Columbia g11, Landsberg erecta and Ohio State. Some of the libraries in the database were obtained from plant parts like aboveground organs, roots, flower buds, green siliques, immature siliques, inflorescence, rosettes, seedling hypocotyls and some from different specific cell types. There were also included a number of clone libraries made from cultured cell lines of A.thaliana.

[0132] All clone libraries in the At Library Registry were separated into four general types: 1) “untreated” indicated clone libraries made from normal plants and its parts cultivated under normal conditions; 2) “treated”—indicated libraries made from plants subjected to any kind of stressing; 3) “low-level” indicated clone libraries prepared from genomic DNA, not on mRNA; 4) “undefined”—indicated clone libraries whose origin could not be deduced with the available information. The resulting base AT Library Registry was presented by a Microsoft Excel workbook consisting of four worksheets, one for each type of clone library class as mentioned above. The total number of sequences that were derived from clone libraries included in AT Library Registry was 113 023 ESTs.

[0133] A round of CDD was conducted when we found quantitative percentages of transcription pools volumes of plants exposed to stress conditions and plants grew in normal physiological conditions. Statistical analysis of expression spectra has revealed the quantitatively reliable differences among plants exposed to salt (hyperosmotic) stresses. The results are presented in Table 3. The conditions for comparing the clusters compared EST's from stress-induced Arabidopsis to normal plants contained EST's expressed in stress-exposed plants. Genes (clusters) of interest demonstrated to be associated with Arabidopsis stress conditions were At.11290 (glutathione S-transferase), At.5388 (Iti30) and At.20845 (COR15 polypeptide).

TABLE 3
Sequences of clusters differentially expressed under salt stress conditions.

| | | | Protein | | |
|---|---|---|---|---|---|
| Cluster | | All | sequences | Target | Background |
| ID | Gene presented by cluster{tc \\| 2″″} | sequences | {tc \\| 1″″} | sequences | sequences |
| At.5801 | Arabidopsis thaliana AT3g28220/T19D11_3 mRNA, | 10 | 2 | 7 | 1 |
| | complete cds | | | | |
| At.5388 | Arabidopsis thaliana (Landsberg Erecta) lti30 mRNA | 13 | 3 | 8 | 1 |
| At.11290 | Arabidopsis thaliana chromosome I glutathione S-transferase | 13 | 3 | 8 | 2 |
| | (GST30) mRNA, complete cds | | | | |
| At.12464 | Arabidopsis thaliana chromosome II section 206 of | 13 | 1 | 11 | 1 |
| | 255 of the complete sequence. Sequence from clones F16M14 | | | | |
| At.20845 | Arabidopsis thaliana mRNA for COR15 polypeptide | 32 | 4 | 24 | 4 |

[0134] The methods of the present invention are also applicable to other agricultural plants that are well represented in the UniGene database. For example, as of Nov. 20, 2001, there were 34812 sequences in 4012 clusters for Hordeum vulgare, 47841 sequences in 12836 clusters for Oryza sativa, 31826 sequences in 2744 clusters for Triticum aestivum and 69231 sequences in 7171 clusters for Zea mays. Furthermore, the methods of the present invention may be applied to other organisms additional datasets are developed that build clusters similar to UniGene database. There are 208198 sequences available for Glycine max, 141687 sequences for Lycopersicon esculentum, 137588 sequences for Medicago truncatula, 76645 sequences for Sorghum bicolor and 55637 sequences for Solanum tuberosum. Since about 113 000 sequences were enough to obtain statistically reliable results in our investigation it is reasonable to recommend using of CDD method for searching for stress-induced genes in the above mentioned plants as done with Arabidopsis.

[0135] The investigation of Arabidopsis thaliana associated ESTs derived from clone libraries made from the stress-exposed and normal plants revealed three genes that encoded proteins that were overexpressed-in-stress proteins (as used herein, the term “stress-overexpressed applies to the fact that 80% or more of the sequences from their clusters are derived from plant grown in stress conditions. The available clone libraries were also adequate for investigation of salt-induced stress. Thus, seven of eight total ESTs in cluster AT.5801 were derived from library m27 made from 10-14-days old shoots treated by 160 mM NaCl solution for several hours. Eight of a total of nine ESTs of cluster At. 11290 are also derived from this clone library. Cluster At.20845 consists of 22 ESTs from the same clone library 27, 2 ESTs from the plant parts treated by 200 mM NaCl (library numbers 15 and 40) and 4 ESTs from the parts of normal plant. Library 27 was deliberately enriched by sequences specifically expressed in salt stressed plant whereas libraries 15 and 40 were not as can bee seen quite clearly from the typical stress-induced cluster structures (as e.g., At.20845). It is clear also that the CDD methods of the present invention are more productive than an experimental approach which is not sensitive enough to distinguish between low levels of expression of salt-induced genes.

[0136] One of the revealed clusters At.11290 represented the glutathione-S-transferase gene (GST30). It is known that glutathione transferases are involved in different stress-induced pathways. For example the expression of one of these transferases is increasing the plant's resistance for the aluminum abundance. Moreover, it was shown that such plants are display a significant increase of oxidative stress resistance which can be seen when straining the plant's roots with H(2)DCFDA (Ezalki B. et al., 2001 Plant Physiol November 2001;127(3):918-927). It is also known that the induction of glutathione-S-transferases occurs when the plant is infected with Peronospora parasitica or Pseudomonas syringae pv. Tomato, when the plant is treated by some kind of herbicides and even when the leaf structure is broken (Rairdan G J et al., 2001 Mol Plant Microbe Interact October 2001;14(10):1235-46; Vollenweider S et al., 2000 Plant J November 2000;24(4):467-76). The level of glutathione-S-transferase gene also increases when the plant cells are treated with auxine, salicylic acid or hydrogenic peroxide (Chen W. Singh KB 1999 Plant Physiol November 2001;127(3):918-927). As it can be deduced from published data the glutathione-S-transferase gene is often overexpressed under different kinds of stress conditions in plants. Nevertheless as it is shown in our work, this gene is specifically expressed under salt stress conditions and may serve as marker for this kind of stress.

[0137] The other revealed cluster At.5388 represents the gene 1ti30 coding dehydrine 1ti30 which synthesis is induced under the low-temperature stress but not in plants treated by abscizic acid or drought or cold (Welin B. V. et al., 1994 Plant Mol Biol October 1994;26(1):131-44). The cluster At.20845 is representing cor15 protein which shows even more cryoprotective activity than BSA or sacharose (Lin C, Thomashow M F, 1992 Biochem Biophys Res Commun March 31, 1992; 183(3):1103-8). So far as both genes were revealed in our CDD experiments with salt stress-induced genes it might be reasonable to suppose a common underlying processes of regulation of the salt- and temperature-induced plant response.

What is claimed is:

1. A method for determining whether a nucleic acid is a marker for a predetermined phenotype or cell type of interest from a biological species which comprises:
(a) providing a database of expressed sequence tag sequences (EST's) from the species;
(b) placing said EST's in groups termed clusters based on homology of EST's within each cluster;
(c) determining for each cluster the total number of EST's within said cluster;
(d) ordering said clusters sequentially based on the number of EST's in each cluster;
(e) dividing said ordered clusters into subranges based on the number of EST's per cluster;
(f) determining for each cluster subrange obtained from step (e) the number EST's within said cluster which are expressed in said predetermined cell type of interest;
(g) calculating according to a normal distribution the number of clusters in each subrange expected to contain a predetermined threshold percentage of EST's expressed in said cell type of interest, wherein said threshold percentage is a percentage from about 10% to about 100%;
(h) determining the number of clusters in each subrange observed to contain said predetermined threshold percentage of EST's expressed in said predetermined cell type; and
(i) identifying subranges having an observed number of clusters that meet said predetermined threshold percentage greater than the number of clusters expected to meet said predetermined threshold percentage for the subrange according to normal distribution;
wherein if the percentage of EST's expressed in said cell type of interest in a cluster identified in (i) is equal to or greater than said predetermined threshold percentage, said cluster contains a nucleic acid that is a marker for the cell type of interest.

2. The method of claim 1 wherein one or more of the steps are performed on a computer.

3. The method of claim 1 wherein the individual clusters are divided into subranges exponentially.

4. The method of claim 1 wherein the individual clusters are divided into subranges linearly.

5. The method of claim 1 wherein the predetermined threshold percentage of EST's expressed in said cell type of interest is a percentage of about 50% to 100%.

6. The method of claim 1 wherein the predetermined threshold percentage of EST's expressed in said cell type of interest is a percentage of about 70% to 100%.

7. The method of claim 1 wherein the predetermined threshold percentage of EST's expressed in said cell type of interest is a percentage of about 80% to 100%.

8. The method of claim 1 wherein the predetermined threshold percentage of EST's expressed in said cell type of interest is a percentage of about 90% to 100%.

9. The method of claim 1 wherein the predetermined threshold percentage of EST's expressed in said cell type of interest is a percentage of at least 80%.

10. The method of claim 1 wherein the predetermined threshold percentage of EST's expressed in said cell type of interest is a percentage of at least 90%.

11. The method of claim 1 wherein the predetermined threshold percentage of EST's expressed in said cell type of interest is a percentage of at least 95%.

12. The method of claim 1 wherein the predetermined threshold percentage of EST's expressed in said cell type of interest is a percentage of 100%.

13. A method as in claim 1 wherein the cell type of interest is an abnormal cell.

14. The method of claim 1 or claim 13 wherein step (i) comprises identifying subranges having an observed number of clusters meeting said predetermined threshold percentage at least five times greater than the number expected for the subrange according to normal distribution.

15. The method of claim 1 or claim 13 wherein step (i) comprises identifying subranges having an observed number of clusters meeting said predetermined threshold percentage at least one standard deviation greater than the number expected for the subrange according to normal distribution.

16. The method of claim 1 or claim 13 wherein the species is human.

17. The method of claim 16 wherein the individual clusters are divided into subranges exponentially.

18. The method of claim 16 wherein the individual clusters are divided into subranges exponentially.

19. The method of claim 16 wherein the predetermined threshold percentage of EST's expressed in a tumor cell is at least 90%.

20. The method of claim 16 wherein the predetermined threshold percentage of EST's expressed in a tumor cell is 95%.

21. The method of claim 16 wherein the predetermined threshold percentage of EST's expressed in a tumor cell is 100%.

22. A method for determining the progression of colon cancer in a human which comprises determining the level of expression of guanylate cyclase 2C in a cell, wherein if the level of guanylate cyclase 2C expression is greater than the level of expression of guanylate cyclase 2C in normal cells, said cell is a tumor cell.

23. The method of claim 22 wherein the level of the guanylate cyclase 2C is detected by determining the level of mRNA expression for the guanylate cyclase 2C gene.

24. An isolated antibody which specifically binds to a tumor-associated antigen encoded by a nucleic acid selected from the group consisting of SEQ IDNO:'s 9, 11, 13, 15, 17, 19, 23, 25, 27, 29, 33, 35, 37, 39, 41, 45, 47, 55, 57, 59, 61, 63, 65, 67, 69, 73, 75, 77, 79, 81, 83, 89, 91, 93, 95, 97, 99, 101, 103, 107, 109, 111, 113, 115, 117, 119, 121, 123, 127, 129, 131, 133, 135, 137, 138, 140, 142, 144, 146, 148, 150, 153, 155, 157, 158, 160, 162, 164, 166, 168, 172, 174, 176, 178, 180, 182, 184, 186, 189, 191, 193, 195, 197, 199, 201, 203, 205, 207, 209, 211, 213, 215, 217, 219, 221, 223, 225, 227, 229, 230, 232, 234, 236, 238, 240, 242, 244, 246, 248, 250, 252, 254, 256, 258, 260, 262, 264, 266, 268, 270, 272, 274, 276, 278, 280, 282, 284, 286, 288, 290, 292, 294, 296, 298, 300, 302, 304, 306, 308, 310, 312, 314, 316, 318, 320, 322, 324, 326, 328, 330, 332, 334, 336, 338, 340, 342, 344, 346, 348, 350, 352, 354, 356, 358, 360, 362, 364, 366, 368, 370, 372, 374, 376, 378, 380, 382, 384, 386, 388, 390, 392, 394, 396, 398, 400, 402, 404, 406, 408, 410, 412 and 414.

25. An isolated antibody as in claim 24 wherein the nucleic acid is encoded by a sequence selected from the group consisting of SEQ ID NO:'s 73, 184, 186 and 242.

26. An isolated antibody as in claim 24 which further comprises a toxin.

27. A method for detecting a tumor cell which comprises detecting the expression in said cell of a tumor-associated marker, wherein said marker is a nucleic acid selected from the group of nucleic acids in claim 24.

28. A method as in claim 27 wherein the nucleic acid marker is selected from the group consisting of SEQ ID NO:'s 73, 184, 186 and 242.

29. A method for detecting a tumor cell which comprises detecting the expression in said cell of a tumor-associated marker, wherein said marker is a polypeptide selected from the group consisting of SEQ ID NO:'s 10, 12, 14, 16, 20, 24, 46, 28, 30, 34, 36, 38, 40, 42, 44, 46, 48, 50, 52, 54, 56, 58, 60, 62, 64, 66, 68, 70, 71, 72, 74, 76, 78, 80, 82, 84, 86, 88, 90, 92, 94, 96, 98, 100, 102, 104, 106, 108, 110, 112, 114, 116, 118, 120, 124, 126, 128, 130, 132, 134, 136, 139, 141, 143, 145, 147, 149, 151, 152, 154, 156, 159, 161, 163, 165, 167, 169, 171, 173, 175, 177, 179, 181, 183, 185, 187, 188, 190, 192, 194, 196, 198, 200, 202, 204, 206, 208, 210, 212, 214, 216, 218, 220, 222, 224, 226, 228, 231, 233, 235, 237, 239, 241, 243, 247, 249, 251, 253, 255, 257, 259, 261, 263, 265, 267, 269, 271, 273, 275, 277, 279, 281, 283, 285, 287, 289, 291, 293, 295, 297, 299, 301, 303, 305, 307, 309, 311, 313, 315, 317, 319, 321, 323, 325, 327, 329, 331, 333, 335, 337, 339, 341, 343, 345, 347, 349, 351, 353, 355, 357, 359, 361, 363, 365, 367, 369, 371, 373, 375, 379, 381, 383, 385, 387, 389, 391, 393, 397, 399, 401, 403, 405, 407, 409, 411, 413 and 415.

30. A method as in claim 29 wherein the polypeptide marker is selected from the group consisting of sequence selected from the group consisting of SEQ ID NO:'s 74, 185, 187, 188 and 243.

31. A method for regulating the growth of a tumor cell which comprises altering the level of expression of a tumor-associated marker, wherein said marker is a nucleic acid selected from the group of nucleic acids of claim 24.

32. A method as in claim 31 wherein the nucleic acid marker is selected from the group consisting of sequences selected from the. group consisting of SEQ ID NO:'s 73, 184, 186 and 242.

33. A method as in claim 31 wherein the level of expression of the tumor-associated marker is regulated with an siRNA.

34. A method for regulating the growth of a tumor cell which comprises altering the level of expression of a tumor marker, wherein said marker is a polypeptide selected from the group of polypeptides of claim 29.

35. A method as in claim 34 wherein the polypeptide is selected from the group consisting of sequence selected from the group consisting of SEQ ID NO:'s 74, 185, 187, 188 and 243.

36. A method for preventing the growth of a tumor cell which comprises treating the cell with an antibody specific for a tumor-associated antigen wherein the antigen comprises a polypeptide as in claim 29.

37. A method as in claim 34 wherein the tumor marker is a polypeptide selected from the polypeptides of SEQ ID NO:'s 74, 185, 187, 188 and 242.

38. A method as in claims 36 or 37 wherein said antibody further comprises a toxin.

39. An isolated polypeptide for use as an immunogen, wherein said polypeptide is selected from the group of polypeptides of claim 29.

39. The isolated peptide of claim 37 or 38 which comprises an epitope reactive with a Cytotoxic T-cell.

40. A method for determining whether a nucleic acid is a marker for a stress-induced phenotype in a species which comprises:
(a) providing a database of expressed sequence tag sequences (EST's) from the species;
(b) placing said EST's in groups termed clusters based on homology of EST's within each cluster;
(c) determining for each cluster the total number of EST's within said cluster;
(d) ordering said clusters sequentially based on the number of EST's in each cluster;
(e) dividing said ordered clusters into subranges based on the number of EST's per cluster;
(f) determining for each cluster subrange obtained from step (e) the number EST's within said cluster which are expressed in a cell under said stress conditions;
(g) calculating according to a normal distribution the number of clusters in each subrange expected to contain a predetermined threshold percentage of EST's expressed in a cell under said stress conditions, wherein said threshold percentage is a percentage from about 10% to about 80%;
(h) determining the number of clusters in each subrange observed to contain said predetermined threshold percentage of EST's expressed in said cell; and
(i) identifying subranges having an observed number of clusters that meet said predetermined threshold percentage greater than the number of clusters expected to meet said predetermined threshold percentage for the subrange according to normal distribution;
wherein if the percentage of EST's expressed in said cell type of interest in a cluster identified in (i) is equal to or greater than said predetermined threshold percentage, said cluster contains a nucleic acid marker that is a marker for the stress-induced phenotype.

41. The method of claim 40 wherein one or more of the steps are performed on a computer.

42. The method of claim 40 wherein the individual clusters are divided into subranges exponentially.

43. The method of claim 40 wherein the individual clusters are divided into subranges linearly.

44. The method of claim 40 wherein the predetermined threshold percentage of EST's expressed in said cell type of interest is a percentage of about 80%.

45. The method of claim 40 wherein the species is Arabdopsis.

46. The method of claims 40 or 45 wherein the stress-induced phenotype is selected from the group consisting of hyperosmotic stress and high salt conditions.

47. A method for determining whether a nucleic acid is a marker for a tumor cell from a human which comprises:
(a) providing a database of expressed sequence tag sequences (EST's) from human tumor cells and human normal cells;
(b) placing said EST's in groups termed clusters based on homology of EST's within each cluster;
(c) determining for each cluster the total number of EST's within said cluster;
(d) ordering said clusters sequentially based on the number of EST's in each cluster;
(e) dividing said ordered clusters into subranges based on the number of EST's per cluster;
(f) determining for each cluster subrange obtained from step (e) the number EST's within said cluster which are expressed in a tumor cell;
(g) calculating according to a normal distribution the number of clusters in each subrange expected to contain a predetermined threshold percentage of EST's expressed in said human tumor cells, wherein said threshold percentage is a percentage from about 10% to about 100%;
(h) determining the number of clusters in each subrange observed to contain said predetermined threshold percentage of EST's expressed in a tumor cell; and
(i) identifying subranges having an observed number of clusters that meet said predetermined threshold percentage greater than the number of clusters expected to meet said predetermined threshold percentage for the subrange according to normal distribution;
wherein if the percentage of EST's expressed in said cell type of interest in a cluster identified in (i) is equal to or greater than said predetermined threshold percentage, said cluster contains a nucleic acid that is a marker for a tumor cell.

48. The method of claim 47 wherein one or more of the steps are performed on a computer.

49. The method of claim 47 wherein the individual clusters are divided into subranges exponentially.

50. The method of claim 47 wherein the individual clusters are divided into subranges linearly.

51. The method of claim 47 wherein the predetermined threshold percentage of EST's expressed in said cell type of interest is a percentage of about 80% to 100%.

52. The method of claim 47 wherein the predetermined threshold percentage of EST's expressed in said cell type of interest is a percentage of at least 90%.

53. The method of claim 47 wherein the predetermined threshold percentage of EST's expressed in said cell type of interest is a percentage of 100%.

54. The method of claim 47 wherein step (i) comprises identifying subranges having an observed number of clusters meeting said predetermined threshold percentage at least five times greater than the number expected for the subrange according to normal distribution.

55. The method of claim 47 wherein step h consists of (i) identifying subranges having an observed number of clusters meeting said predetermined threshold percentage at least one standard deviation greater than the number expected for the subrange according to normal distribution.

The application's sequence listing, which the Patent Office published only in electronic form, follows.

SEQUENCE LISTING (415 sequences)

SEQ ID NO: 1 - DNA, 24 bp, Homo sapiens
tctttcttgatgaattatcttatg

SEQ ID NO: 2 - DNA, 18 bp, Homo sapiens
acacaccctcattcccgc

SEQ ID NO: 3 - DNA, 21 bp, Homo sapiens
gtcaaccttctcatcttcctc

SEQ ID NO: 4 - DNA, 20 bp, Homo sapiens
caggaagttgggtagatgtg

SEQ ID NO: 5 - DNA, 24 bp, Homo sapiens
taattgcattcttcaaaattctac

SEQ ID NO: 6 - DNA, 21 bp, Homo sapiens
gcttcgcaccattgaataaac

SEQ ID NO: 7 - DNA, 23 bp, Homo sapiens
tacatagttgttatcttaaggtg

SEQ ID NO: 8 - DNA, 21 bp, Homo sapiens
tgggaattctatacttttgac

SEQ ID NO: 9 - DNA, 1969 bp, Homo sapiens
atggagctgctcaagctgaaccggagcgtgcagggaaccggacccgggccgggggcttccctgtgccgcccgggggcgcctctcctcaacagcagcagtgtgggcaacctcagctgcgagccccctcgcattcgcggagccgggacacgagaattggagctggccattagaatcactctttacgcagtgatcttcctgatgagcgttggaggaaatatgctcatcatcgtggtcctgggactgagccgccgcctgaggactgtcaccaatgccttcctcctctcactggcagtcagcgacctcctgctggctgtggcttgcatgcccttcaccctcctgcccaatctcatgggcacattcatctttggcaccgtcatctgcaaggcggtttcctacctcatgggggtgtctgtgagtgtgtccacgctaagcctcgtggccatcgcactggagcggtacagcgccatctgccgaccactgcaggcacgagtgtggcagacgcgctcccacgcggctcgcgtgattgtagccacgtggctgctgtccggactactcatggtgccctaccccgtgtacactgtcgtgcaaccagtggggcctcgtgtgctgcagtgcgtgcatcgctggcccagtgcgcgggtccgccagacctggtccgtactgctgcttctgctcttgttcttcatcccgggtgtggttatggccgtggcctacgggcttatctctcgcgagctctacttagggcttcgctttgacggcgacagtgacagcgacagccaaagcagggtccgaaaccaaggcgggctgccaggggctgttcaccagaacgggcgttgccggcctgagactggcgcggttggcgaagacagcgatggctgctacgtgcaacttccacgttcccggcctgccctggagctgacggcgctgacggctccagggccgggatccggctcccggcccacccaggccaagctgctggctaagaagcgcgtggtgcgaatgttgctggtgatcgttgtgcttttttttctgtgttggttgccagtttatagtgccaacacgtggcgcgcctttgatggcccgggtgcacaccgagcactctcgggtgctcctatctccttcattcacttgctgagctacgcctcggcctgtgtcaaccccctggtctactgcttcatgcaccgtcgctttcgccaggcctgcctggaaacttgcgctcgctgctgcccccggcctccacgagctcgccccagggctcttcccgatgaggaccctcccactccctccattgcttcgctgtccaggcttagctacaccaccatcagcacactgggccctggctgaggagtagaggggccgtgggggttgaggcagggcaaatgacatgcactgacccttccagacatagaaaacacaaaccacaactgacacaggaaaccaacacccaaagcatggactaaccccaacgacaggaaaaggtagcttacctgacacaagaggaataagaatggagcagtacatgggaaaggaggcatgcctctgatatgggactgagcctggcccatagaaacatgacactgaccttggagagacacagcgtccctagcagtgaactatttctacacagtgggaactctgacaagggctgacctgcctctcacacacatagattaatggcactgattgttttagagactatggagcctggcacaggactgactctgggatgctcctagtttgacctcacagtgacccttcccaatcagcactgaaaataccatcaggcctaatctcatacctctgaccaacaggctgttctgcactgaaaaggttcttcatccctttccagttaaggaccgtggccctgccctctccttccttcccaaactgttcaagaaataataaattgtttggcttcctcctgaaaaaaaaaaaaaaaaaaaaaaaaaaaaaaaaaaaaaggaattcc

SEQ ID NO: 10 - protein, 447 aa, Homo sapiens
MELLKLNRSVQGTGPGPGASLCRPGAPLLNSSSVGNLSCEPPRIRGAGTRELELAIRITLYAVIFLMSVGGNMLIIVVLGLSRRLRTVTNAFLLSLAVSDLLLAVACMPFTLLPNLMGTFIFGTVICKAVSYLMGVSVSVSTLSLVAIALERYSAICRPLQARVWQTRSHAARVIVATWLLSGLLMVPYPVYTVVQPVGPRVLQCVHRWPSARVRQTWSVLLLLLLFFIPGVVMAVAYGLISRELYLGLRFDGDSDSDSQSRVRNQGGLPGAVHQNGRCRPETGAVGEDSDGCYVQLPRSRPALELTALTAPGPGSGSRPTQAKLLAKKRVVRMLLVIVVLFFLCWLPVYSANTWRAFDGPGAHRALSGAPISFIHLLSYASACVNPLVYCFMHRRFRQACLETCARCCPRPPRARPRALPDEDPPTPSIASLSRLSYTTISTLGPG

SEQ ID NO: 11 - DNA, 2091 bp, Homo sapiens
atgactggagtctttgacagtctagtggctgatatgcactcgacccagatcgccgcctccagcacgtaccaccagcaccagcagcccccgagcggcggcggcgccggcccgggtggcaacagcagcagcagcagcagcctccacaagccccaggagtcgcccacccttccggtgtccaccgccaccgacagcagctactacaccaaccagcagcacccggcgggcggcggcggcggcgggggctcgccctacgcgcacatgggttcctaccagtaccaagccagcggcctcaacaacgtcccttactccgccaagagcagctatgacctgggctacaccgccgcctacacctcctacgctccctatggaaccagttcgtccccagccaacaacgagcctgagaaggaggaccttgagcctgaaattcggatagtgaacgggaagccaaagaaagtccggaaaccccgcaccatctactccagtttccagctggcggctcttcagcggcgtttccaaaagactcagtacttggccttgccggagcgagccgagctggcggcctctctgggcctcacccagactcaggtcaaaatctggttccagaaccgccggtccaagttcaagaagatgtggaaaagtggtgagatcccctcggagcagcaccctggggccagcgcttctccaccttgtgcttcgccgccagtctcagcgccggcctcctgggactttggtgtgccgcagcggatggcgggcggcggtggtccgggcagtggcggcagcggcgccggcagctcgggctccagcccgagcagcgcggcctcggcttttctgggcaactacccctggtaccaccagacctcgggatccgcctcacacctgcaggccacggcgccgctgctgcaccccactcagaccccgcagccgcatcaccaccaccaccatcacggcggcgggggcgccccggtgagcgcggggacgattttctaaccccagggagaactcgccagagactgagagcagagaccacttatcctcattgcttaccccgagccggggttccctcctcccggcccgctgccgccacccacctctcctgcaggctgcgacctgcagtggcccgtctcaggccctgctcactcccggggccaccaaacgggcccctctctcgggggaaccggacagcagcttggcaaaggcctccctaaaaggccgcatttctgacctgagccccgggtctcggctgtttcgagccccgcctcggacttgccttccctcccctccgggtgagcctgtctggcgccttcctcgccccgggctgagagctgggtcccgggagatggaagcctcccaggcgcgcgaggcttcccgggcgctctgaggcttctttctcctcgcccgctcccctgggctcagctcggacgctgcagttattgacctcccggtcccgcctgcccgccctcccccacgtggccccttgacccgggcggccccgccgcttctttccttcctgcagttcccagccctcggagcccccatcccttatcttacccccaccgcgctcccccaggagcgctccctcagctctctcctcatccatcaccagtggagtttttttattttttatttttttaaaagtttaggtgcctttgcggatgacctcattttgacgttgaaaaaatgattttttaatatgtgaacactgcaaaaatgtgtttaaattatcttttttaaaacctattcaggattattagcctggacttggacacagagtttgtaaataaaggtgtctgtgcagattttcccactgatttatttgtataaaaatactcatcttttcagacttttttgtaaacccccagttgtgaaaactgcagtttagcagtgacctcagcaacccctcctttttattttttcctttaaaaacatttcagttaaattaagctactgatttggatttgttttatcgtatcctaaagtctttgttgttgaaatgaaaggtattttggggttatttattatgaaaacaacatgctcttaatgttgattttacaatatgaagagattatttaaataaattattgttttcattgg

SEQ ID NO: 12 - protein, 328 aa, Homo sapiens
MTGVFDSLVADMHSTQIAASSTYHQHQQPPSGGGAGPGGNSSSSSSLHKPQESPTLPVSTATDSSYYTNQQHPAGGGGGGGSPYAHMGSYQYQASGLNNVPYSAKSSYDLGYTAAYTSYAPYGTSSSPANNEPEKEDLEPEIRIVNGKPKKVRKPRTIYSSFQLAALQRRFQKTQYLALPERAELAASLGLTQTQVKIWFQNRRSKFKKMWKSGEIPSEQHPGASASPPCASPPVSAPASWDFGVPQRMAGGGGPGSGGSGAGSSGSSPSSAASAFLGNYPWYHQTSGSASHLQATAPLLHPTQTPQPHHHHHHHGGGGAPVSAGTIF

SEQ ID NO: 13 - DNA, 879 bp, Homo sapiens
tgaattcgtgggacagagcaccatgacttctgagaaaggtccttcaaccggtgaccccactctgaggagaagaatcgaaccctgggagtttgacgtcttctatgaccccagagaacttcgtaaagaggcctgtctgctctacgaaatcaagtggggcatgagccggaagatctggcgaagctcaggcaaaaacaccaccaatcacgtggaagttaattttataaaaaaatttacgtcagaaagagattttcacccatccatgagctgctccatcacctggttcttgtcctggagtccctgctgggaatgctcccaggctattagagagtttctgagtcggcaccctggtgtgactctagtgatctacgtagctcggcttttttggcacatggatcaacaaaatcggcaaggtctcagggaccttgttaacagtggagtaactattcagattatgagagcatcagagtattatcactgctggaggaattttgtcaactacccacctggggatgaagctcactggccacaatacccacctctgtggatgatgttgtacgcactggagctgcactgcataattctaagtcttccaccctgtttaaagatttcaagaagatggcaaaatcatcttacatttttcagacttcatcttcaaaactgccattaccaaacgattccgccacacatccttttagctacagggctgatacatccttctgtggcttggagatgaataggatgattccgtgtgtgtactgattcaagaacaagcaatgatgacccactaaagagtgaatgccatttagaatctagaaatgttcacaaggtaccccaaaactctgtagcttaaaccaacaataaatatgtattacctctggc

SEQ ID NO: 14 - protein, 236 aa, Homo sapiens
MTSEKGPSTGDPTLRRRIEPWEFDVFYDPRELRKEACLLYEIKWGMSRKIWRSSGKNTTNHVEVNFIKKFTSERDFHPSMSCSITWFLSWSPCWECSQAIREFLSRHPGVTLVIYVARLFWHMDQQNRQGLRDLVNSGVTIQIMRASEYYHCWRNFVNYPPGDEAHWPQYPPLWMMLYALELHCIILSLPPCLKISRRWQNHLTFFRLHLQNCHYQTIPPHILLATGLIHPSVAWR

SEQ ID NO: 15 - DNA, 1718 bp, Homo sapiens
cagttaccgggagaggctgtgtcaaaggcgccatgagcaagatcagcgaggccgtgaagcgcgcccgcgccgccttcagctcgggcaggacccgtccgctgcagttccggatccagcagctggaggcgctgcagcgcctgatccaggagcaggagcaggagctggtgggcgcgctggccgcagacctgcacaagaatgaatggaacgcctactatgaggaggtggtgtacgtcctagaggagatcgagtacatgatccagaagctccctgagtgggccgcggatgagcccgtggagaagacgccccagactcagcaggacgagctctacatccactcggagccactgggcgtggtcctcgtcattggcacctggaactaccccttcaacctcaccatccagcccatggtgggcgccatcgctgcagggaacgcagtggtcctcaagccctcggagctgagtgagaacatggcgagcctgctggctaccatcatcccccagtacctggacaaggatctgtacccagtaatcaatgggggtgtccctgagaccacggagctgctcaaggagaggttcgaccatatcctgtacacgggcagcacgggggtggggaagatcatcatgacggctgctgccaagcacctgacccctgtcacgctggagctgggagggaagagtccctgctacgtggacaagaactgtgacctggacgtggcctgccgacgcatcgcctgggggaaattcatgaacagtggccagacctgcgtggccccagactacatcctctgtgacccctcgatccagaaccaaattgtggagaagctcaagaagtcactgaaagagttctacggggaagatgctaagaaatcccgggactatggaagaatcattagtgcccggcacttccagagggtgatgggcctgattgagggccagaaggtggcttatgggggcaccggggatgccgccactcgctacatagcccccaccatcctcacggacgtggacccccagtccccggtgatgcaagaggagatcttcgggcctgtgctgcccatcgtgtgcgtgcgcagcctggaggaggccatccagttcatcaaccagcgtgagaagcccctggccctctacatgttctccagcaacgacaaggtgattaagaagatgattgcagagacatccagtggtggggtggcggccaacgatgtcatcgtccacatcaccttgcactctctgcccttcgggggcgtggggaacagcggcatgggatcctaccatggcaagaagagcttcgagactttctctcaccgccgctcttgcctggtgaggcctctgatgaatgatgaaggcctgaaggtcagataccccccgagcccggccaagatgacccagcactgaggaggggttgctccgcctggcctggccatactgtgtcccatcggagtgcggaccaccctcactggctctcctggccctgggagaatcgctcctgcagccccagcccagccccactcctctgctgacctgctgacctgtgcacaccccactcccacatgggcccaggcctcaccattccaagtctccacccctttctagaccaataaagagacaaatacaattttctaactcagcaaaaaaaaaaaaaaaaaaaaaaaaaaaaaaaaaaaaaaaaaaaaaaaaaaaaaaaaaaaaaaaaaaaaaaaaaaaaaaaaaaaacccccg

SEQ ID NO: 16 - protein, 453 aa, Homo sapiens [sequence omitted]

SEQ ID NO: 17 - DNA, 3745 bp, Homo sapiens
cgcaaagcaagtgggcacaaggagtatggttctaacgtgattggggtcatgaagacgttgctgttggacttggctttgtggtcactgctcttccagcccgggtggctgtcctttagttcccaggtgagtcagaactgccacaatggcagctatgaaatcagcgtcctgatgatgggcaactcagcctttgcagagcccctgaaaaacttggaagatgcggtgaatgaggggctggaaatagtgagaggacgtctgcaaaatgctggcctaaatgtgactgtgaacgctactttcatgtattcggatggtctgattcataactcaggcgactgccggagtagcacctgtgaaggcctcgacctactcaggaaaatttcaaatgcacaacggatgggctgtgtcctcatagggccctcatgtacatactccaccttccagatgtaccttgacacagaattgagctaccccatgatctcagctggaagttttggattgtcatgtgactataaagaaaccttaaccaggctgatgtctccagctagaaagttgatgtacttcttggttaacttttggaaaaccaacgatctgcccttcaaaacttattcctggagcacttcgtatgtttacaagaatggtacagaaactgaggactgtttctggtaccttaatgctctggaggctagcgtttcctatttctcccacgaactcggctttaaggtggtgttaagacaagataaggagtttcaggatatcttaatggaccacaacaggaaaagcaatgtgattattatgtgtggtggtccagagttcctctacaagctgaagggtgaccgagcagtggctgaagacattgtcattattctagtggatcttttcaatgaccagtacttggaggacaatgtcacagcccctgactatatgaaaaatgtccttgttctgacgctgtctcctgggaattcccttctaaatagctctttctccaggaatctatcaccaacaaaacgagactttgctcttgcctatttgaatggaatcctgctctttggacatatgctgaagatatttcttgaaaatggagaaaatattaccacccccaaatttgctcatgctttcaggaatctcacttttgaagggtatgacggtccagtgaccttggatgactggggggatgttgacagtaccatggtgcttctgtatacctctgtggacaccaagaaatacaaggttcttttgacctatgatacccacgtaaataagacctatcctgtggatatgagccccacattcacttggaagaactctaaacttcctaatgatattacaggccggggccctcagatcctgatgattgcagtcttcaccctcactggagctgtggtgctgctcctgctcgtcgctctcctgatgctcagaaaatatagaaaagattatgaacttcgtcagaaaaaatggtcccacattcctcctgaaaatatctttcctctggagaccaatgagaccaatcatgttagcctcaagatcgatgatgacaaaagacgagatacaatccagagactacgacagtgcaaatacgacaaaaagcgagtgattctcaaagatctcaagcacaatgatggtaatttcactgaaaaacagaagatagaattgaacaagttgcttcagattgactattacaacctgaccaagttctacggcacagtgaaacttgataccatgatcttcggggtgatagaatactgtgagagaggatccctccgggaagttttaaatgacacaatttcctaccctgatggcacattcatggattgggagtttaagatctctgtcttgtatgacattgctaagggaatgtcatatctgcactccagtaagacagaagtccatggtcgtctgaaatctaccaactgcgtagtggacagtagaatggtggtgaagatcactgattttggctgcaattccattttacctccaaaaaaggacctgtggacagctccagagcacctccgccaagccaacatctctcagaaaggagatgtgtacagctatgggatcatcgcacaggagatcattctgcggaaagaaaccttctacactttgagctgtcgggaccggaatgagaagattttcagagtggaaaattccaatggaatgaaacccttccgcccagatttattcttggaaacagcagaggaaaaagagctagaagtgtacctacttgtaaaaaactgttgggaggaagatccagaaaagagaccagatttcaaaaaaattgagactacacttgccaagatatttggactttttcatgaccaaaaaaatgaaagctatatggataccttgatccgacgtctacagctatattctcgaaacctggaacatctggtagaggaaaggacacagctgtacaaggcagagagggacagggctgacagacttaactttatgttgcttccaaggctagtggtaaagtctctgaaggagaaaggctttgtggagccggaactatatgaggaagttacaatctacttcagtgacattgtaggtttcactactatctgcaaatacagcacccccatggaagtggtggacatgcttaatgacatctataagagttttgaccacattgttgatcatcatgatgtctacaaggtggaaaccatcggtgatgcgtacatggtggctagtggtttgcctaagagaaatggcaatcggcatgcaatagacattgccaagatggccttggaaatcctcagcttcatggggacctttgagctggagcatcttcctggcctcccaatatggattcgcattggagttcactctggtccctgtgctgctggagttgtgggaatcaagatgcctcgttattgtctatttggagatacggtcaacacagcctctaggatggaatccactggcctccctttgagaattcacgtgagtggctccaccatagccatcctgaagagaactgagtgccagttcctttatgaagtgagaggagaaacatacttaaagggaagaggaaatgagactacctactggctgactgggatgaaggaccagaaattcaacctgccaacccctcctactgtggagaatcaacagcgtttgcaagcagaattttcagacatgattgccaactctttacagaaaagacaggcagcagggataagaagccaaaaacccagacgggtagccagctataaaaaaggcactctggaatacttgcagctgaataccacagacaaggagagcacctatttttaaacctaaatgaggtataaggactcacacaaattaaaatacagctgcactgaggcagcgacctcaagtgtcctgaaagcttacattttcctgagacctcaatgaagcagaaatgtacttaggcttggctgccctgtctggaacatggactttcttgcatgaatcagatgtgtgttctcagtgaaataactaccttccactctggaaccttattccagcagttgttccagggagcttctacctggaaaagaaaagaaatgaatagactatctagaacttgagaagattttattcttatttcatttattttttgtttgtttatttttatcgtttttgtttactggctttccttctgtattcataagattttttaaattgtcataattatattttaaatacccatcttcattaaagtatatttaactcataatttttgcagaaaatatgctatatattaggcaagaataaaagctaaagg

SEQ ID NO: 18 - protein, 1073 aa, Homo sapiens
MKTLLLDLALWSLLFQPGWLSFSSQVSQNCHNGSYEISVLMMGNSAFAEPLKNLEDAVNEGLEIVRGRLQNAGLNVTVNATFMYSDGLIHNSGDCRSSTCEGLDLLRKISNAQRMGCVLIGPSCTYSTFQMYLDTELSYPMISAGSFGLSCDYKETLTRLMSPARKLMYFLVNFWKTNDLPFKTYSWSTSYVYKNGTETEDCFWYLNALEASVSYFSHELGFKVVLRQDKEFQDILMDHNRKSNVIIMCGGPEFLYKLKGDRAVAEDIVIILVDLFNDQYLEDNVTAPDYMKNVLVLTLSPGNSLLNSSFSRNLSPTKRDFALAYLNGILLFGHMLKIFLENGENITTPKFAHAFRNLTFEGYDGPVTLDDWGDVDSTMVLLYTSVDTKKYKVLLTYDTHVNKTYPVDMSPTFTWKNSKLPNDITGRGPQILMIAVFTLTGAVVLLLLVALLMLRKYRKDYELRQKKWSHIPPENIFPLETNETNHVSLKIDDDKRRDTIQRLRQCKYDKKRVILKDLKHNDGNFTEKQKIELNKLLQIDYYNLTKFYGTVKLDTMIFGVIEYCERGSLREVLNDTISYPDGTFMDWEFKISVLYDIAKGMSYLHSSKTEVHGRLKSTNCVVDSRMVVKITDFGCNSILPPKKDLWTAPEHLRQANISQKGDVYSYGIIAQEIILRKETFYTLSCRDRNEKIFRVENSNGMKPFRPDLFLETAEEKELEVYLLVKNCWEEDPEKRPDFKKIETTLAKIFGLFHDQKNESYMDTLIRRLQLYSRNLEHLVEERTQLYKAERDRADRLNFMLLPRLVVKSLKEKGFVEPELYEEVTIYFSDIVGFTTICKYSTPMEVVDMLNDIYKSFDHIVDHHDVYKVETIGDAYMVASGLPKRNGNRHAIDIAKMALEILSFMGTFELEHLPGLPIWIRIGVHSGPCAAGVVGIKMPRYCLFGDTVNTASRMESTGLPLRIHVSGSTIAILKRTECQFLYEVRGETYLKGRGNETTYWLTGMKDQKFNLPTPPTVENQQRLQAEFSDMIANSLQKRQAAGIRSQKPRRVASYKKGTLEYLQLNTTDKESTYF

SEQ ID NO: 19 - DNA, 1274 bp, Homo sapiens
cagcgggagacggccacgagattcccccatctctttgaatataattttagattgagattcagattaaatccgaggggaaaacactttatgaggctgaaagctgtgtcgttgccagagacagggttatgagctatcaaatgcaattacattaagacagattatactgggcaaattgagccatttagaaggtgagaatcaaagaaacggctctgatcctcttttcccccttctctctccctctccctctctctctaaattgcagttcgtagttccttccaattcggaggcacaaaagtaggtgagactgcttttgtatctgcgaagtgcttcactcctgaatgtaattctagctgagtgcaatctaggttaagagccggacaagcgggtaattagagcccgctagctgcccgaggaccggccgccccgccaaagcgcgccccgagtcggcgcccttctcccggccgagcctagctgcggctggacacggagcgcccgagatgatggtgctggacaaggaggacggcgtgccgatgctctccgtccagcccaaagggaagcagaagggctgtgcgggctgtaaccgcaagatcaaggaccgctatctgctgaaggcattggacaagtactggcacgaagactgcctcaagtgtgcgtgctgtgactgccgcctgggcgaggtgggctccaccctctacaccaaggccaacctcatcctgtgccgacgcgactacctgaggctctttggcaccacagggaactgtgctgcttgcagcaagctgatcccagccttcgagatggtgatgcgggcccgggacaacgtgtatcacctcgactgcttcgcctgccagctctgcaaccagagattttgtgtgggagacaaattcttcctgaagaacaacatgatcttgtgtcagatggactatgaggaagggcagctcaatggcacctttgaatcccaagttcagtaacgcccggcgcctggcctccaggcccgtctgtccatctgcccgcctgcccacctgcctggccggccagccagccactctaccagtgcaggctggccagccgctctcctgccacattagaacttctccgtcctcgatgggagggatggcccttcctcctccaccaccgcccgtctgtgtgtgacccctcctggggccaggccgggcctgtacagtctgtcttctgtatataaatgggaacatttattttatgagaaatgtaatgcgattttattactggcgtggattaaacttatgaatgtttccggg

SEQ ID NO: 20 - protein, 156 aa, Homo sapiens
MMVLDKEDGVPMLSVQPKGKQKGCAGCNRKIKDRYLLKALDKYWHEDCLKCACCDCRLGEVGSTLYTKANLILCRRDYLRLFGTTGNCAACSKLIPAFEMVMRARDNVYHLDCFACQLCNQRFCVGDKFFLKNNMILCQMDYEEGQLNGTFESQVQ

SEQ ID NO: 21 - DNA, 2490 bp, Homo sapiens
ggcacgaggcttctggccagggaacgtggaaggcgcaccgacagggatccggccagggagggcgagtgaaagaaggaaatcagaaaggaagggagttaacaaaataataaaaacagcctgagccacggctggagagaccgagacccggcgcaagagagcgcagccttagtaggagaggaacgcgagacgcggcagagcgcgttcagcactgacttttgctgctgcttctgcttttttttttcttagaaacaagaaggcgccagcggcagcctcacacgcgagcgccacgcgaggctcccgaagccaacccgcgaagggaggaggggagggaggaggaggcggcgtgcagggaggagaaaaagcattttcactttttttgctcccactctaagaagtctcccggggattttgtatatattttttaacttccgtcagggctcccgcttcatatttccttttctttccctctctgttcctgcacccaagttctctctgtgtccccctcgcgggccccgcacctcgcgtcccggatcgctctgattccgcgactccttggccgccgctgcgcatggaaagctctgccaagatggagagcggcggcgccggccagcagccccagccgcagccccagcagcccttcctgccgcccgcagcctgtttctttgccacggccgcagccgcggcggccgcagccgccgcagcggcagcgcagagcgcgcagcagcagcagcagcagcagcagcagcagcagcaggcgccgcagctgagaccggcggccgacggccagccctcagggggcggtcacaagtcagcgcccaagcaagtcaagcgacagcgctcgtcttcgcccgaactgatgcgctgcaaacgccggctcaacttcagcggctttggctacagcctgccgcagcagcagccggccgccgtggcgcgccgcaacgagcgcgagcgcaaccgcgtcaagttggtcaacctgggctttgccacccttcgggagcacgtccccaacggcgcggccaacaagaagatgagtaaggtggagacactgcgctcggcggtcgagtacatccgcgcgctgcagcagctgctggacgagcatgacgcggtgagcgccgccttccaggcaggcgtcctgtcgcccaccatctcccccaactactccaacgacttgaactccatggccggctcgccggtctcatcctactcgtcggacgagggctcttacgacccgctcagccccgaggagcaggagcttctcgacttcaccaactggttctgaggggctcggcctggtcaggccctggtgcgaatggactttggaagcagggtgatcgcacaacctgcatctttagtgctttcttgtcagtggcgttgggagggggagaaaaggaaaagaaaaaaaaagaagaagaagaagaaaagagaagaagaaaaaaacgaaaacagtcaaccaaccccatcgccaactaagcgaggcatgcctgagagacatggctttcagaaaacgggaagcgctcagaacagtatctttgcactccaatcattcacggagatatgaagagcaactgggacctgagtcaatgcgcaaaatgcagcttgtgtgcaaaagcagtgggctcctggcagaagggagcagcacacgcgttatagtaactcccatcacctctaacacgcacagctgaaagttcttgctcgggtcccttcacctccccgccctttcttagagtgcagttcttagccctctagaaacgagttggtgtctttcgtctcagtagcccccaccccaataagctgtagacattggtttacagtgaaactatgctattctcagccctttgaaactctgcttctcctccagggcccgattcccaaaccccatggcttccctcacactgtcttttctaccattttcattatagaatgcttccaatcttttgtgaattttttattataaaaaatctatttgtatctatcctaaccagttcggggatatattaagatatttttgtacataagagagaaagagagagaaaaatttatagaagttttgtacaaatggtttaaaatgtgtatatcttgatactttaacatgtaatgctattacctctgcatattttagatgtgtagttcaccttacaactgcaattttccctatgtggttttgtaaagaactctcctcataggtgagatcaagaggccaccagttgtacttcagcaccaatgtgtcttactttatagaaatgttgttaatgtattaatgatgttattaaatactgttcaagaagaacaaagtttatgcagctactgtccaaactcaaagtggcagccagttggttttgataggttgccttttggagatttctattactgccttttttttcttactgttttattacaaacttacaaaaatatgtataaccctgttttatacaaactagtttcgtaataaaactttttcctttttttaaaatgaaaaaaaaaaaaaaaaaa

SEQ ID NO: 22 - protein, 236 aa, Homo sapiens
MESSAKMESGGAGQQPQPQPQQPFLPPAACFFATAAAAAAAAAAAAAQSAQQQQQQQQQQQQAPQLRPAADGQPSGGGHKSAPKQVKRQRSSSPELMRCKRRLNFSGFGYSLPQQQPAAVARRNERERNRVKLVNLGFATLREHVPNGAANKKMSKVETLRSAVEYIRALQQLLDEHDAVSAAFQAGVLSPTISPNYSNDLNSMAGSPVSSYSSDEGSYDPLSPEEQELLDFTNWF

SEQ ID NO: 23 - DNA, 2445 bp, Homo sapiens
aacataggtgtctgagagactccagcattttcggacttcttagtcttgagagtgccaggctatttatctcgaccagccaagctctggagagcaatgttgaatccctgagaagagagagcatggggcgtgctgatttaaaaacagaaaatgcaaagttggactgaaaatatccttagtcttccaagcaatctgcttaagggttccaaacttaccttaatttggtgagaaaagaagctgccctatttttctttcttcttcttctacaactggaaccagccatttccgaaaaccaccaccatggaggttgcaatggtgagtgcggagagctcagggtgcaacagtcacatgccttatggttatgctgcccaggcccgggcccgggagcgggagaggcttgctcactccagggcagctgcagcagctgctgttgcagcggccacagctgctgtcgaaggtagcgggggttctggtgggggctcccaccaccaccaccagtcacgcggggcctgtacctcccatgaccctcagagcagccggggtagtcggaggaggaggcgacagcggtctgagaagaagaaagcccactaccggcagagcagcttccctcattgctctgacctgatgcccagtggctctgaggagaagatcctgagggagctgagtgaggaggaggaagatgaggaggaggaggaagaggaggaagaggagggaaggttttactatagtgaagatgaccatggtgatgagtgttcctacacggatctgctgcctcaggatgagggcggtggcggctacagttcagtccgctacagtgactgttgtgaacgtgtggtgataaatgtgtcaggcctacgctttgagacccaaatgaaaactctggcccagtttccagagactttgttgggagaccctgaaaagaggactcagtactttgaccctttgcgcaatgagtatttttttgacaggaaccgccccagctttgatgccatcttgtattattatcaatcaggaggccgcctgaagaggccagtcaatgtcccctttgatatcttcactgaggaggtgaagttctatcagttgggggaggaggccctgttgaagtttcgggaggacgagggctttgtgagagaagaggaagacagggccctccccgagaatgaatttaaaaagcagatttggctcctctttgaatatccagagagctccagtcctgcaaggggcatagccattgtgtccgtcctggtcatcttaatctccattgtcatcttttgcctggaaaccttgcctgagtttagggacgacagggatctcgtcatggcactgagtgctggcgggcatggtgggttgttgaatgatacttcagcaccccatctggagaactcagggcacacaatattcaatgaccccttcttcatcgtggaaacagtctgtattgtatggttttcctttgagtttgtggttcgctgctttgcttgtcccagccaagcactcttcttcaaaaacatcatgaacatcattgacattgtctccattttgccttacttcatcacactgggcactgacctggcccagcaacaggggggtggcaatggtcagcagcagcaggccatgtcctttgccatcctcagaatcattcgtctggtccgagtattccggatcttcaaactctccaggcactccaaaggcctgcagatcctgggccacaccctcagagccagcatgcgggaactgggccttctgatcttcttcctcttcattggggtcatcctcttttctagtgctgtgtattttgcagaggcggatgaacctactacccatttccaaagcatcccagatgcattttggtgggctgtggtgaccatgacaactgtgggctatggggacatgaagcccatcactgtagggggcaagattgtcgggtccctgtgtgccattgcgggtgtcttaaccattgctttgccagtgccagtgattgtctctaactttaactatttctaccacagagagactgaaaatgaggaacagacacagctaacgcagaatgcagtcagttgtccatacctcccctctaatttgctcaagaaatttcggagctctacttcttcttccctgggggacaagtcagagtatctagagatggaagaaggagttaaggaatctctgtgtgcaaaggaggagaagtgtcagggaaagggggatgacagtgagacagataaaaacaactgttctaatgcaaaggctgtggagactgatgtgtgaatctttttccacctgccactgctcccccctcagcatctccaaatatatttatgcatagagagtgcagttatgaaaatgaaatatgcaaatgatccaatgcatacagtagtacactatttaatggttatacatggcataattgttactaaacttgtattacatatcaaataaatgatacatcttgga

SEQ ID NO: 24 - protein, 653 aa, Homo sapiens
MEVAMVSAESSGCNSHMPYGYAAQARARERERLAHSRAAAAAAVAAATAAVEGSGGSGGGSHHHHQSRGACTSHDPQSSRGSRRRRRQRSEKKKAHYRQSSFPHCSDLMPSGSEEKILRELSEEEEDEEEEEEEEEEGRFYYSEDDHGDECSYTDLLPQDEGGGGYSSVRYSDCCERVVINVSGLRFETQMKTLAQFPETLLGDPEKRTQYFDPLRNEYFFDRNRPSFDAILYYYQSGGRLKRPVNVPFDIFTEEVKFYQLGEEALLKFREDEGFVREEEDRALPENEFKKQIWLLFEYPESSSPARGIAIVSVLVILISIVIFCLETLPEFRDDRDLVMALSAGGHGGLLNDTSAPHLENSGHTIFNDPFFIVETVCIVWFSFEFVVRCFACPSQALFFKNIMNIIDIVSILPYFITLGTDLAQQQGGGNGQQQQAMSFAILRIIRLVRVFRIFKLSRHSKGLQILGHTLRASMRELGLLIFFLFIGVILFSSAVYFAEADEPTTHFQSIPDAFWWAVVTMTTVGYGDMKPITVGGKIVGSLCAIAGVLTIALPVPVIVSNFNYFYHRETENEEQTQLTQNAVSCPYLPSNLLKKFRSSTSSSLGDKSEYLEMEEGVKESLCAKEEKCQGKGDDSETDKNNCSNAKAVETDV

SEQ ID NO: 25 - DNA, 3336 bp, Homo sapiens
ttttcttagacattaactgcagacggctggcaggatagaagcagcggctcacttggactttttcaccagggaaatcagagacaatgatggggctcttccccagaactacaggggctctggccatcttcgtggtggtcatattggttcatggagaattgcgaatagagactaaaggtcaatatgatgaagaagagatgactatgcaacaagctaaaagaaggcaaaaacgtgaatgggtgaaatttgccaaaccctgcagagaaggagaagataactcaaaaagaaacccaattgccaagattacttcagattaccaagcaacccagaaaatcacctaccgaatctctggagtgggaatcgatcagccgccttttggaatctttgttgttgacaaaaacactggagatattaacataacagctatagtcgaccgggaggaaactccaagcttcctgatcacatgtcgggctctaaatgcccaaggactagatgtagagaaaccacttatactaacggttaaaattttggatattaatgataatcctccagtattttcacaacaaattttcatgggtgaaattgaagaaaatagtgcctcaaactcactggtgatgatactaaatgccacagatgcagatgaaccaaaccacttgaattctaaaattgccttcaaaattgtctctcaggaaccagcaggcacacccatgttcctcctaagcagaaacactggggaagtccgtactttgaccaattctcttgaccgagagcaagctagcagctatcgtctggttgtgagtggtgcagacaaagatggagaaggactatcaactcaatgtgaatgtaatattaaagtgaaagatgtcaacgataacttcccaatgtttagagactctcagtattcagcacgtattgaagaaaatattttaagttctgaattacttcgatttcaagtaacagatttggatgaagagtacacagataattggcttgcagtatatttctttacctctgggaatgaaggaaattggtttgaaatacaaactgatcctagaactaatgaaggcatcctgaaagtggtgaaggctctagattatgaacaactacaaagcgtgaaacttagtattgctgtcaaaaacaaagctgaatttcaccaatcagttatctctcgataccgagttcagtcaaccccagtcacaattcaggtaataaatgtaagagaaggaattgcattccgtcctgcttccaagacatttactgtgcaaaaaggcataagtagcaaaaaattggtggattatatcctgggaacatatcaagccatcgatgaggacactaacaaagctgcctcaaatgtcaaatatgtcatgggacgtaacgatggtggatacctaatgattgattcaaaaactgctgaaatcaaatttgtcaaaaatatgaaccgagattctactttcatagttaacaaaacaatcacagctgaggttctggccatagatgaatacacgggtaaaacttctacaggcacggtatatgttagagtacccgatttcaatgacaattgtccaacagctgtcctcgaaaaagatgcagtttgcagttcttcaccttccgtggttgtctccgctagaacactgaataatagatacactggcccctatacatttgcactggaagatcaacctgtaaagttgcctgccgtatggagtatcacaaccctcaatgctacctcggccctcctcagagcccaggaacagatacctcctggagtataccacatctccctggtacttacagacagtcagaacaatcggtgtgagatgccacgcagcttgacactggaagtctgtcagtgtgacaacaggggcatctgtggaacttcttacccaaccacaagccctgggaccaggtatggcaggccgcactcagggaggctggggcctgccgccatcggcctgctgctccttggtctcctgctgctgctgttggccccccttctgctgttgacctgtgactgtggggcaggttctactgggggagtgacaggtggttttatcccagttcctgatggctcagaaggaacaattcatcagtggggaattgaaggagcccatcctgaagacaaggaaatcacaaatatttgtgtgcctcctgtaacagccaatggagccgatttcatggaaagttctgaagtttgtacaaatacgtatgccagaggcacagcggtggaaggcacttcaggaatggaaatgaccactaagcttggagcagccactgaatctggaggtgctgcaggctttgcaacagggacagtgtcaggagctgcttcaggattcggagcagccactggagttggcatctgttcctcagggcagtctggaaccatgagaacaaggcattccactggaggaaccaataaggactacgctgatggggcgataagcatgaattttctggactcctacttttctcagaaagcatttgcctgtgcggaggaagacgatggccaggaagcaaatgactgcttgttgatctatgataatgaaggcgcagatgccactggttctcctgtgggctccgtgggttgttgcagttttattgctgatgacctggatgacagcttcttggactcacttggacccaaatttaaaaaacttgcagagataagccttggtgttgatggtgaaggcaaagaagttcagccaccctctaaagacagcggttatgggattgaatcctgtggccatcccatagaagtccagcagacaggatttgttaagtgccagactttgtcaggaagtcaaggagcttctgctttgtccgcctctgggtctgtccagccagctgtttccatccctgaccctctgcagcatggtaactatttagtaacggagacttactcggcttctggttccctcgtgcaaccttccactgcaggctttgatccacttctcacacaaaatgtgatagtgacagaaagggtgatctgtcccatttccagtgttcctggcaacctagctggcccaacgcagctacgagggtcacatactatgctctgtacagaggatccttgctcccgtctaatatgaccagaatgagctggaataccacactgaccaaatctggatctttggactaaagtattcaaaatagcatagcaaagctcactgtattgggctaataatttggcacttattagcttctctcataaactgatcacgattataaattaaatgtttgggttcataccccaaaagcaatatgttgtcactcctaattctcaagtactattcaaattgtagtaaatcttaaagtttttcaaaaccctaaaatcatattcgc

SEQ ID NO: 26 - protein, 999 aa, Homo sapiens
MMGLFPRTTGALAIFVVVILVHGELRIETKGQYDEEEMTMQQAKRRQKREWVKFAKPCREGEDNSKRNPIAKITSDYQATQKITYRISGVGIDQPPFGIFVVDKNTGDINITAIVDREETPSFLITCRALNAQGLDVEKPLILTVKILDINDNPPVFSQQIFMGEIEENSASNSLVMILNATDADEPNHLNSKIAFKIVSQEPAGTPMFLLSRNTGEVRTLTNSLDREQASSYRLVVSGADKDGEGLSTQCECNIKVKDVNDNFPMFRDSQYSARIEENILSSELLRFQVTDLDEEYTDNWLAVYFFTSGNEGNWFEIQTDPRTNEGILKVVKALDYEQLQSVKLSIAVKNKAEFHQSVISRYRVQSTPVTIQVINVREGIAFRPASKTFTVQKGISSKKLVDYILGTYQAIDEDTNKAASNVKYVMGRNDGGYLMIDSKTAEIKFVKNMNRDSTFIVNKTITAEVLAIDEYTGKTSTGTVYVRVPDFNDNCPTAVLEKDAVCSSSPSVVVSARTLNNRYTGPYTFALEDQPVKLPAVWSITTLNATSALLRAQEQIPPGVYHISLVLTDSQNNRCEMPRSLTLEVCQCDNRGICGTSYPTTSPGTRYGRPHSGRLGPAAIGLLLLGLLLLLLAPLLLLTCDCGAGSTGGVTGGFIPVPDGSEGTIHQWGIEGAHPEDKEITNICVPPVTANGADFMESSEVCTNTYARGTAVEGTSGMEMTTKLGAATESGGAAGFATGTVSGAASGFGAATGVGICSSGQSGTMRTRHSTGGTNKDYADGAISMNFLDSYFSQKAFACAEEDDGQEANDCLLIYDNEGADATGSPVGSVGCCSFIADDLDDSFLDSLGPKFKKLAEISLGVDGEGKEVQPPSKDSGYGIESCGHPIEVQQTGFVKCQTLSGSQGASALSASGSVQPAVSIPDPLQHGNYLVTETYSASGSLVQPSTAGFDPLLTQNVIVTERVICPISSVPGNLAGPTQLRGSHTMLCTEDPCSRLI

SEQ ID NO: 27 - DNA, 1667 bp, Homo sapiens
aagcacaggccaccactctgccctggtccacacaagctccggtagcccatggagccctggcctctcctcctgctctttagcctttgctcagctggcctcgtcctgggctccgaacatgagacccgtctggtggcaaagctatttaaagactacagcagcgtggtgcggccagtggaagaccaccgccaggtcgtggaggtcaccgtgggcctgcagctgatacagctcatcaatgtggatgaagtaaatcagatcgtgacaaccaatgtgcgtctgaaacagcaatgggtggattacaacctaaaatggaatccagatgactatggcggtgtgaaaaaaattcacattccttcagaaaagatctggcgcccagaccttgttctctataacaatgcagatggtgactttgctattgtcaagttcaccaaagtgctcctgcagtacactggccacatcacgtggacacctccagccatctttaaaagctactgtgagatcatcgtcacccactttccctttgatgaacagaactgcagcatgaagctgggcacctggacctacgacggctctgtcgtggccatcaacccggaaagcgaccagccagacctgagcaacttcatggagagcggggagtgggtgatcaaggagtcccggggctggaagcactccgtgacctattcctgctgccccgacaccccctacctggacatcacctaccacttcgtcatgcagcgcctgcccctctacttcatcgtcaacgtcatcatcccctgcctgctcttctccttcttaactggcctggtattctacctgcccacagactcaggggagaagatgactctgagcatctctgtcttactgtctttgactgtgttccttctggtcatcgtggagctgatcccctccacgtccagtgctgtgcccttgattggaaaatacatgctgttcaccatggtgttcgtcattgcctccatcatcatcactgtcatcgtcatcaacacacaccaccgctcacccagcacccatgtcatgcccaactgggtgcggaaggtttttatcgacactatcccaaatatcatgtttttctccacaatgaaaagaccatccagagaaaagcaagacaaaaagatttttacagaagacattgatatctctgacatttctggaaagccagggcctccacccatgggcttccactctcccctgatcaaacaccccgaggtgaaaagtgccatcgagggcatcaagtacatcgcagagaccatgaagtcagaccaggagtctaacaatgcggcggcagagtggaagtacgttgcaatggtgatggaccacatactcctcggagtcttcatgcttgtttgcatcatcggaaccctagccgtgtttgcaggtcgactcattgaattaaatcagcaaggatgagcagaaaatgagctgagcttagctctgccctggaacctaccagagcagagaagggcaggagaggaagatttgtctacttgctccactcgcacttatcaaacgtgttatattccatacttattattgatgataagatttacctttatgtaagtttatggccttgaagtgttttcatattgcttctccctttagttctgctgtctccctgaagagtgaaccctctttagtaaatgaaactaatcact

SEQ ID NO: 28 - protein, 457 aa, Homo sapiens
MEPWPLLLLFSLCSAGLVLGSEHETRLVAKLFKDYSSVVRPVEDHRQVVEVTVGLQLIQLINVDEVNQIVTTNVRLKQQWVDYNLKWNPDDYGGVKKIHIPSEKIWRPDLVLYNNADGDFAIVKFTKVLLQYTGHITWTPPAIFKSYCEIIVTHFPFDEQNCSMKLGTWTYDGSVVAINPESDQPDLSNFMESGEWVIKESRGWKHSVTYSCCPDTPYLDITYHFVMQRLPLYFIVNVIIPCLLFSFLTGLVFYLPTDSGEKMTLSISVLLSLTVFLLVIVELIPSTSSAVPLIGKYMLFTMVFVIASIIITVIVINTHHRSPSTHVMPNWVRKVFIDTIPNIMFFSTMKRPSREKQDKKIFTEDIDISDISGKPGPPPMGFHSPLIKHPEVKSAIEGIKYIAETMKSDQESNNAAAEWKYVAMVMDHILLGVFMLVCIIGTLAVFAGRLIELNQQG

SEQ ID NO: 29 - DNA, 3587 bp, Homo sapiens
ggcacgaggcccagacagagtgtccccacaccctcctctgagacgccatgttcaactcgatgaccccaccaccaatcagtagctatggcgagccctgctgtctccggcccctccccagtcagggggcccccagtgtggggacagaaggactgtctggcccgcccttctgccaccaagctaacctcatgtccggcccccacagttatgggccagccagagagaccaacagctgcaccgagggcccactcttttcttctccccggagtgcagtcaagttgaccaagaagcgggcactgtccatctcacctctgtcggatgccagcctggacctgcagacggttatccgcacctcacccagctccctcgtagctttcatcaactcgcgatgcacatctccaggaggctcctacggtcatctctccattggcaccatgagcccatctctgggattcccagcccagatgaatcaccaaaaagggccctcgccttcctttggggtccagccttgtggtccccatgactctgcccggggtgggatgatcccacatcctcagtcccggggacccttcccaacttgccagctgaagtctgagctggacatgctggttggcaagtgccgggaggaacccttggaaggtgatatgtccagccccaactccacaggcatacaggatcccctgttggggatgctggatgggcgggaggacctcgagagagaggagaagcgtgagcctgaatctgtgtatgaaactgactgccgttgggatggctgcagccaggaatttgactcccaagagcagctggtgcaccacatcaacagcgagcacatccacggggagcggaaggagttcgtgtgccactgggggggctgctccagggagctgaggcccttcaaagcccagtacatgctggtggttcacatgcgcagacacactggcgagaagccacacaagtgcacgtttgaagggtgccggaagtcatactcacgcctcgaaaacctgaagacgcacctgcggtcacacacgggtgagaagccatacatgtgtgagcacgagggctgcagtaaagccttcagcaatgccagtgaccgagccaagcaccagaatcggacccattccaatgagaagccgtatgtatgtaagctccctggctgcaccaaacgctatacagatcctagctcgctgcgaaaacatgtcaagacagtgcatggtcctgacgcccatgtgaccaaacggcaccgtggggatggccccctgcctcgggcaccatccatttctacagtggagcccaagagggagcgggaaggaggtcccatcagggaggaaagcagactgactgtgccagagggtgccatgaagccacagccaagccctggggcccagtcatcctgcagcagtgaccactccccggcagggagtgcagccaatacagacagtggtgtggaaatgactggcaatgcagggggcagcactgaagacctctccagcttggacgagggaccttgcattgctggcactggtctgtccactcttcgccgccttgagaacctcaggctggaccagctacatcaactccggccaatagggacccggggtctcaaactgcccagcttgtcccacaccggtaccactgtgtcccgccgcgtgggccccccagtctctcttgaacgccgcagcagcagctccagcagcatcagctctgcctatactgtcagccgccgctcctccctggcctctcctttcccccctggctccccaccagagaatggagcatcctccctgcctggccttatgcctgcccagcactacctgcttcgggcaagatatgcttcagccagagggggtggtacttcgcccactgcagcatccagcctggatcggataggtggtcttcccatgcctccttggagaagccgagccgagtatccaggatacaaccccaatgcaggggtcacccggagggccagtgacccagcccaggctgctgaccgtcctgctccagctagagtccagaggttcaagagcctgggctgtgtccataccccacccactgtggcagggggaggacagaactttgatccttacctcccaacctctgtctactcaccacagccccccagcatcactgagaatgctgccatggatgctagagggctacaggaagagccagaagttgggacctccatggtgggcagtggtctgaacccctatatggacttcccacctactgatactctgggatatgggggacctgaaggggcagcagctgagccttatggagcgaggggtccaggctctctgcctcttgggcctggtccacccaccaactatggccccaacccctgtccccagcaggcctcatatcctgaccccacccaagaaacatggggtgagttcccttcccactctgggctgtacccaggccccaaggctctaggtggaacctacagccagtgtcctcgacttgaacattatggacaagtgcaagtcaagccagaacaggggtgcccagtggggtctgactccacaggactggcaccctgcctcaatgcccaccccagtgaggggcccccacatccacagcctctcttttcccattacccccagccctctcctccccaatatctccagtcaggcccctatacccagccaccccctgattatcttccttcagaacccaggccttgcctggactttgattcccccacccattccacagggcagctcaaggctcagcttgtgtgtaattatgttcaatctcaacaggagctactgtgggagggtgggggcagggaagatgcccccgcccaggaaccttcctaccagagtcccaagtttctggggggttcccaggttagcccaagccgtgctaaagctccagtgaacacatatggacctggctttggacccaacttgcccaatcacaagtcaggttcctatcccaccccttcaccatgccatgaaaattttgtagtgggggcaaatagggcttcacatagggcagcagcaccacctcgacttctgcccccattgcccacttgctatgggcctctcaaagtgggaggcacaaaccccagctgtggtcatcctgaggtgggcaggctaggagggggtcctgccttgtaccctcctcccgaaggacaggtatgtaaccccctggactctcttgatcttgacaacactcagctggactttgtggctattctggatgagccccaggggctgagtcctcctccttcccatgatcagcggggcagctctggacataccccacctccctctgggccccccaacatggctgtgggcaacatgagtgtcttactgagatccctacctggggaaacagaattcctcaactctagtgcctaaagagtagggaatctcatccatcacagatcgcatttcctaaggggtttctatccttccagaaaaattgggggagctgcagtcccctgcacaagatgccccagggatgggaggtatgggctgggggctatgtatagtctgtatacgttttgaggagaaatttgataatgacactgtttcctgataataaaggaactgcatcagaaaaaaaaaaaaaaaaaa

SEQ ID NO: 30 - protein, 1106 aa, Homo sapiens
MFNSMTPPPISSYGEPCCLRPLPSQGAPSVGTEGLSGPPFCHQANLMSGPHSYGPARETNSCTEGPLFSSPRSAVKLTKKRALSISPLSDASLDLQTVIRTSPSSLVAFINSRCTSPGGSYGHLSIGTMSPSLGFPAQMNHQKGPSPSFGVQPCGPHDSARGGMIPHPQSRGPFPTCQLKSELDMLVGKCREEPLEGDMSSPNSTGIQDPLLGMLDGREDLEREEKREPESVYETDCRWDGCSQEFDSQEQLVHHINSEHIHGERKEFVCHWGGCSRELRPFKAQYMLVVHMRRHTGEKPHKCTFEGCRKSYSRLENLKTHLRSHTGEKPYMCEHEGCSKAFSNASDRAKHQNRTHSNEKPYVCKLPGCTKRYTDPSSLRKHVKTVHGPDAHVTKRHRGDGPLPRAPSISTVEPKREREGGPIREESRLTVPEGAMKPQPSPGAQSSCSSDHSPAGSAANTDSGVEMTGNAGGSTEDLSSLDEGPCIAGTGLSTLRRLENLRLDQLHQLRPIGTRGLKLPSLSHTGTTVSRRVGPPVSLERRSSSSSSISSAYTVSRRSSLASPFPPGSPPENGASSLPGLMPAQHYLLRARYASARGGGTSPTAASSLDRIGGLPMPPWRSRAEYPGYNPNAGVTRRASDPAQAADRPAPARVQRFKSLGCVHTPPTVAGGGQNFDPYLPTSVYSPQPPSITENAAMDARGLQEEPEVGTSMVGSGLNPYMDFPPTDTLGYGGPEGAAAEPYGARGPGSLPLGPGPPTNYGPNPCPQQASYPDPTQETWGEFPSHSGLYPGPKALGGTYSQCPRLEHYGQVQVKPEQGCPVGSDSTGLAPCLNAHPSEGPPHPQPLFSHYPQPSPPQYLQSGPYTQPPPDYLPSEPRPCLDFDSPTHSTGQLKAQLVCNYVQSQQELLWEGGGREDAPAQEPSYQSPKFLGGSQVSPSRAKAPVNTYGPGFGPNLPNHKSGSYPTPSPCHENFVVGANRASHRAAAPPRLLPPLPTCYGPLKVGGTNPSCGHPEVGRLGGGPALYPPPEGQVCNPLDSLDLDNTQLDFVAILDEPQGLSPPPSHDQRGSSGHTPPPSGPPNMAVGNMSVLLRSLPGETEFLNSSA

SEQ ID NO: 31 - DNA, 1167 bp, Homo sapiens
catgagtcagtgaacagggaatgggtgaatgacatttgtgggtaggttatttctagaagttaggtgggcagcttggaaggcagaggcacttctacagactattccttggggccacacgtaggttcttgaatcccgaatggaaaggggagattgataattggtgtgtttatgttcttacaagtcttctgccttttaaaatccagtcccaggacatcaaagctctgcagaaagaactcgagcaatttgccaagctcctgaagcagaagaggatcaccctgggatatacacaggccgatgtggggctcaccctgggggttctatttgggaaggtattcagccaaacgaccatctgccgctttgaggctctgcagcttagcttcaagaacatgtgtaagctgcggcccttgctgcagaagtgggtggaggaagctgacaacaatgaaaatcttcaggagatatgcaaagcagaaaccctcgtgcaggcccgaaagagaaagcgaaccagtatcgagaaccgagtgagaggcaacctggagaatttgttcctgcagtgcccgaaaccgacactgcagcagatcagccacatcgcccagcagcttgggctcgagaaggatgtggtccgagtgtggttctgtaaccggcgccagaagggcaagcgatcaagcagcgactatgcacaacgagaggattttgaggctgctgggtctcctttctcagggggaccagtgtcctttcctctggccccagggccccattttggtaccccaggctatgggagccctcacttcactgcactgtactcctcggtccctttccctgagggggaagcctttccccctgtctccgtcaccactctgggctctcccatgcattcaaactgaggtgcctgcccttctaggaatgggggacagggggaggggaggagctagggaaagaaaacctggagtttgtgccagggtttttgggattaagttcttcattcactaaggaaggaattgggaacacaaagggtgggggcaggggagtttggggcaactggttggagggaaggtgaagttcaatgatgctcttgattttaatcccacatcatgtatcacttttttcttaaataaagaagcctgggacacagtagataggcaaaaaaaaaaaaaaaaaaaaaaaaaaaaa

SEQ ID NO: 32 - protein, 164 aa, Homo sapiens
MCKLRPLLQKWVEEADNNENLQEICKAETLVQARKRKRTSIENRVRGNLENLFLQCPKPTLQQISHIAQQLGLEKDVVRVWFCNRRQKGKRSSSDYAQREDFEAAGSPFSGGPVSFPLAPGPHFGTPGYGSPHFTALYSSVPFPEGEAFPPVSVTTLGSPMHSN

SEQ ID NO: 33 - DNA, 2130 bp, Homo sapiens
ggcttggattctgaaaccttccttgtatccctcctgagacatctttgctgcaagatcgaggctgtcctctggtgagaaggtggtgaggcttcccgtcatattccagctctgaacagcaacatggggtgcaaagtcctgctcaacattgggcagcagatgctgcggcggaaggtggtggactgtagccgggaggagacgcggctgtctcgctgcctgaacacttttgatctggtggccctcggggtgggcagcacactgggtgctggtgtctacgtcctggctggagctgtggcccgtgagaatgcaggccctgccattgtcatctccttcctgatcgctgcgctggcctcagtgctggctggcctgtgctatggcgagtttggtgctcgggtccccaagacgggctcagcttacctctacagctatgtcaccgttggagagctctgggccttcatcaccggctggaacttaatcctctcctacatcatcggtacttcaagcgtagcgagggcctggagcgccaccttcgacgagctgataggcagacccatcggggagttctcacggacacacatgactctgaacgcccccggcgtgctggctgaaaaccccgacatattcgcagtgatcataattctcatcttgacaggacttttaactcttggtgtgaaagagtcggccatggtcaacaaaatattcacttgtattaacgtcctggtcctgggcttcataatggtgtcaggatttgtgaaaggatcggttaaaaactggcagctcacggaggaggattttgggaacacatcaggccgtctctgtttgaacaatgacacaaaagaagggaagcccggtgttggtggattcatgcccttcgggttctctggtgtcctgtcgggggcagcgacttgcttctatgccttcgtgggctttgactgcatcgccaccacaggtgaagaggtgaagaacccacagaaggccatccccgtggggatcgtggcgtccctcttgatctgcttcatcgcctactttggggtgtcggctgccctcacgctcatgatgccctacttctgcctggacaataacagccccctgcccgacgcctttaagcacgtgggctgggaaggtgccaagtacgcagtggccgtgggctccctctgcgctctttccgccagtcttctaggttccatgtttcccatgcctcgggttatctatgccatggctgaggatggactgctatttaaattcttagccaacgtcaatgataggaccaaaacaccaataatcgccacattagcctcgggtgccgttgctgctgtgatggccttcctctttgacctgaaggacttggtggacctcatgtccattggcactctcctggcttactcgttggtggctgcctgtgtgttggtcttacggtaccagccagagcagcctaacctggtataccagatggccagtacttccgacgagttagatccagcagaccaaaatgaattggcaagcaccaatgattcccagctggggtttttaccagaggcagagatgttctctttgaaaaccatactctcacccaaaaacatggagccttccaaaatctctgggctaattgtgaacatttcaaccagccttatagctgttctcatcatcaccttctgcattgtgaccgtgcttggaagggaggctctcaccaaaggggcgctgtgggcagtctttctgctcgcagggtctgccctcctctgtgccgtggtcacgggcgtcatctggaggcagcccgagagcaagaccaagctctcatttaaggttcccttcctgccagtgctccccatcctgagcatcttcgtgaacgtctatctcatgatgcagctggaccagggcacctgggtccggtttgctgtgtggatgctgataggcttcatcatctactttggctatggcctgtggcacagcgaggaggcgtccctggatgccgaccaagcaaggactcctgacggcaacttggaccagtgcaagtgacgcacagccccgccccccggaggtggcagcagccccgagggacgcccccagaggaccgggaggcaccccaccctccccaccagtgcaacagaaaccacctgcgtccacaccctcactgca

SEQ ID NO: 34 - protein, 629 aa, Homo sapiens
MGCKVLLNIGQQMLRRKVVDCSREETRLSRCLNTFDLVALGVGSTLGAGVYVLAGAVARENAGPAIVISFLIAALASVLAGLCYGEFGARVPKTGSAYLYSYVTVGELWAFITGWNLILSYIIGTSSVARAWSATFDELIGRPIGEFSRTHMTLNAPGVLAENPDIFAVIIILILTGLLTLGVKESAMVNKIFTCINVLVLGFIMVSGFVKGSVKNWQLTEEDFGNTSGRLCLNNDTKEGKPGVGGFMPFGFSGVLSGAATCFYAFVGFDCIATTGEEVKNPQKAIPVGIVASLLICFIAYFGVSAALTLMMPYFCLDNNSPLPDAFKHVGWEGAKYAVAVGSLCALSASLLGSMFPMPRVIYAMAEDGLLFKFLANVNDRTKTPIIATLASGAVAAVMAFLFDLKDLVDLMSIGTLLAYSLVAACVLVLRYQPEQPNLVYQMASTSDELDPADQNELASTNDSQLGFLPEAEMFSLKTILSPKNMEPSKISGLIVNISTSLIAVLIITFCIVTVLGREALTKGALWAVFLLAGSALLCAVVTGVIWRQPESKTKLSFKVPFLPVLPILSIFVNVYLMMQLDQGTWVRFAVWMLIGFIIYFGYGLWHSEEASLDADQARTPDGNLDQCK

SEQ ID NO: 35 - DNA, 2627 bp, Homo sapiens
ggtctgtccacttgccggtccctcagaccgtcggcggtctctgtccgcttcgggacctgtccgctggtcgctccgcgtccgatggctcctggccgcggaaccttaggcctggccctggtctccgagcgcgggttcgccgggaggagcgtgtggcgggggtgtgccggggcgtgagtgcgccgagcatggggctgagcctggtgtggggagtgggtatctgcggagccggcctgaaccccacctcagccgggcgcggggagggggctccgtgcgtgtgatcgtgcagctgtgagcgcgtggccgccccgcggggctccgctgcaggcccctcagccccaggagcagtactcgctcttcagggcctgccctggatcctggaggctacacagctgcccactcctcctggggaggctgccgtggaggccatggagatccctgccccggagcccgagaagacaggaatcggtgagtttcaaggatgtggctgtggacttcacccaggaggagtggggtcaactagactcccctcagagggccttgtaccgggatgtgatgttggagaactaccagaaccttcttgccctaggacctccactgcacaagccagatgtgatctctcatctggaacgaggcgaggagccatggagcatgcagagggaagtccccagagggccctgtccagaatgggagctgaaggcggtgccctctcaacagcagggcatttgcaaagaagaaccggcccaggagcccatcatggagcggcccctcggcggggcgcaggcgtgggggcgccaggcaggtgctctgcagaggagtcaggctgcgccctgggcgcccgcacctgccatggtctgggacgtccctgtagaggaattccccctcaggtgtcccctcttcgcccagcaacgcgttcccgaggggggacccttgctggacacacgcaagaacgtccaggccactgagggcagaaccaaggcccccgcgagactgtgtgcaggggaaaacgcctccacgccaagtgagccagaaaagttcccccaggtgcgccggcagcgcggggcgggcgccggggagggcgagttcgtgtgcggcgagtgcgggaaggcgttccgccagagctcctccctcacgctgcaccggcgctggcacagccgggagaaggcttacaagtgcgatgaatgcggcaaggccttcacctggagcaccaaccttctggagcaccggcgcatccacaccggcgagaagcccttcttctgcggcgagtgcgggaaggccttcagctgccactcgtccctcaacgtgcaccagcgcatccacacgggcgagcggccctacaagtgcagcgcctgcgagaaggccttcagctgcagctcgctgctcagcatgcacctgcgggtgcacaccggcgagaagccctaccggtgcggcgagtgcggcaaggccttcaaccagcgtacacacctcacacgccaccaccgcatccacacgggcgagaagccctaccagtgcggctcctgcggcaaggccttcacctgccactcatccctcaccgtgcatgagaagatccacagcggggacaagccgttcaagtgcagcgactgcgagaaggccttcaacagccgctcgcgcctcaccctccaccagaggacgcacacgggcgagaagcccttcaagtgcgccgactgcgggaagggcttcagctgccacgcgtacctgctcgtgcaccggcgcatccacagcggcgagaagcccttcaagtgcaacgagtgcggcaaagccttcagctcccacgcctacctcatcgtgcaccggcgcatccacacaggcgagaagcccttcgactgcagccagtgttggaaggccttcagctgccactcgtccctcatcgtgcaccagcgcatccacaccggtgagaagccctacaagtgcagcgagtgcggcagagccttcagccagaaccactgtctcattaaacatcagaaaatccactccggggagaagtcgtttaagtgtgagaaatgtggggagatgttcaactggagctcgcacctcactgagcaccagaggctgcacagcgaggggaagcccttggccatccagttcaacaaacacctgctcagcacatactacgtgcctggcagcctgctgggtgcaggggatgctggactgagggacgtggatcccatcgacgcgctggatgtggcaaagctcttgtgcgtggttccccccagagctggcaggaatttctccctggggagcaaacctcgaaactaacatgatgtgctttggtgtcagtagctgctttctgagctactcaacaaggaaagcaccctggtcctccctggctcctagatccagaccaccttcctccaggtgtgggagccttgccttatcaccccaatcaggtctgcatgccagggtgcctcctctagttaaagtcagtcacctccccagaagggccacactccaggaggagtgttgagagtcatttgaggtagtcttgccacctgttttccttgatgggcctggaagttgttgacaaggggaaagatctttcttgccaataaaaagaagggatatcgttgggaaaaaaaaaaaaaaaaaaaaaaaaaaaaaaaaaaaaaaaa

SEQ ID NO: 36 - protein, 573 aa, Homo sapiens
MLENYQNLLALGPPLHKPDVISHLERGEEPWSMQREVPRGPCPEWELKAVPSQQQGICKEEPAQEPIMERPLGGAQAWGRQAGALQRSQAAPWAPAPAMVWDVPVEEFPLRCPLFAQQRVPEGGPLLDTRKNVQATEGRTKAPARLCAGENASTPSEPEKFPQVRRQRGAGAGEGEFVCGECGKAFRQSSSLTLHRRWHSREKAYKCDECGKAFTWSTNLLEHRRIHTGEKPFFCGECGKAFSCHSSLNVHQRIHTGERPYKCSACEKAFSCSSLLSMHLRVHTGEKPYRCGECGKAFNQRTHLTRHHRIHTGEKPYQCGSCGKAFTCHSSLTVHEKIHSGDKPFKCSDCEKAFNSRSRLTLHQRTHTGEKPFKCADCGKGFSCHAYLLVHRRIHSGEKPFKCNECGKAFSSHAYLIVHRRIHTGEKPFDCSQCWKAFSCHSSLIVHQRIHTGEKPYKCSECGRAFSQNHCLIKHQKIHSGEKSFKCEKCGEMFNWSSHLTEHQRLHSEGKPLAIQFNKHLLSTYYVPGSLLGAGDAGLRDVDPIDALDVAKLLCVVPPRAGRNFSLGSKPRN

SEQ ID NO: 37 - DNA, 6586 bp, Homo sapiens
ctggggagccggcgctggaggtggtgagtggcgtggggactgtgtcgagggggtccccaaggtgccggaccctgcggaggggcgaagtttcggcactggggagggcgtgcggacgctttccctacaggcgaccactgctctgcgggcgggtggtcttagctccagtcccccattcagttcctcagcattccaggtcggcggcgaaggggtccccgaacgaagggcgcaaggcagcgtctctgctgggaccgggaagccggacttcagggcctctcggcccgtgggcttctccccgagtctccccgagtcggttggcattaagagtttagcagatactttcagaaatggatacataagaaatggctggaaatcaaatgaatgtccaaagaagagcttagggtcttagtaacattcttttttaaaataactgtctgccaaaatgtcattacacagtactcataatagaaataacagcggtgatattcttgatattccttcttcccaaaatagttcatcactgaatgccctcacccacagtagccgacttaagctgcatttgaagtcggatatgtcagaatgtgaaaatgatgatccattattgagatctgcaggtaaagtcagagacataaatagaacttatgttatttctgccagtagaaaaacagcagacatgccccttacccctaatcctgtaggtagattggcacttcagaggagaactacaaggaacaaagaatcatctttgcttgttagtgagttggaagacacaactgaaaaaacagcagaaacacgtcttacattacaacgtcgtgctaaaacagattctgcagaaaagtggaaaacagctgaaatagattctgtcaaaatgacactgaatgtgggaggtgaaacagaaaataatggtgtttctaaggaaagtagaacaaatgtaaggattgtaaataatgctaaaaactcttttgttgcctcttctgtacctttagatgaagatccacaggtcattgaaatgatggctgataagaaatacaaagaaacattttctgcccccagtagagcaaatgaaaatgttgcacttaagtactcaagtaatagaccacccattgcttccctgagtcagactgaagttgttagatcaggacacttgacaacgaaacctactcagagcaagttggatatcaaagtgttgggaacaggaaacttgtatcatagaagtattgggaaggaaattgcaaaaacttcaaataaatttgggagcttagaaaaaagaacacctacaaaatgtacaacagaacacaaactgacaacaaagtgcagcctgcctcagcttaagagcccagctccatcaatactgaagaatagaatgtctaaccttcaagttaaacaaagaccaaaaagttcctttcttgcaaataaacaggaaagatccgcagaaaatacaattcttcccgaagaagaaactgtagttcagaacacctctgcaggaaaagaccccttaaaagtagagaatagtcaagtgacagtggcagtacgcgtaagacctttcaccaagagagagaagattgaaaaagcatcccaggtagtcttcatgagtgggaaagaaataactgtggaacaccctgacacgaaacaagtttataattttatttatgatgtttcattctggtcttttgatgaatgtcatcctcactacgctagccagacaactgtctatgagaagctagcagcaccactcctagaaagagccttcgaaggcttcaatacctgtctttttgcttatggtcagactggctctggaaaatcatatacgatgatgggatttagtgaagaaccaggaataattccaagattttgtgaagatcttttttctcaagtagccagaaaacaaacccaagaggtcagctatcacattgaaatgagcttctttgaagtatataatgaaaaaattcacgaccttctggtttgtaaagatgaaaatgggcagagaaagcaaccactgagagtgagggaacatcctgtttatggaccatatgttgaagcactgtcaatgaacattgtcagttcttacgctgatatccagagttggctagaattgggaaataaacaaagagctactgctgctactggtatgaatgataaaagttcccgatctcattcagttttcaccctggtgatgacccagaccaagacagaatttgtggaaggggaagaacacgatcacagaataacaagtcgaattaacctaatagatctggcaggcagtgagcgctgctctacggctcacactaatggagatcgactaaaggaaggtgtgagtattaataagtccttgctaactttgggaaaagttatatctgcactttcggaacaagcaaaccaaaggagtgtttttattccttatcgtgaatctgttcttacatggctgttaaaagaaagtctgggtggaaattcaaaaactgcaatgattgctacgattagtcccgctgccagcaacatagaagaaacattaagcacacttagatatgctaaccaagcccgtttaatagtcaacattgctaaagtaaatgaagatatgaacgctaagttaattagagaattgaaggcagaaattgcaaagctaaaagctgctcagagaaacagtcggaatattgaccctgaacgatacaggctctgtcggcaagaaataacatccttaagaatgaaactgcatcaacaggagagagacatggcagaaatgcaaagagtgtggaaagaaaagtttgaacaagctgaaaaaagaaaacttcaagaaacaaaagagttacagaaagcaggaattatgtttcaaatggacaatcatttaccaaaccttgttaatctgaatgaagatccacaactatctgagatgctgctatatatgataaaagaaggaacaactacagttggaaagtataaaccaaactcaagccatgatattcagttatctggggtgctgattgctgatgatcattgtactatcaaaaattttggtgggacagtgagtattatcccagttggggaagcaaagacatatgtaaatggaaaacatattttggaaatcacagtattacgtcatggtgatcgagtgattcttggtggagatcattattttagatttaatcatccagtagaagtccagaaaggaaaaaggccatctggaagagatactcctataagtgagggtccaaaagactttgaatttgcaaaaaatgagttgctcatggcacagagatcacaacttgaagcagaaataaaagaggctcagttgaaggcaaaggaagaaatgatgcaaggaatccagattgcaaaagaaatggctcagcaagagctttcttctcaaaaagctgcatatgaaagcaaaataaaagcactggaagcagaactgagagaagagtctcaaaggaaaaaaatgcaggaaataaataaccagaaggctaatcacaaaattgaggaattagaaaaggcaaagcagcatcttgaacaggaaatatatgtcaacaaaaagcgattagaaatggagacattggctacaaaacaggctttagaagaccatagcatccgccatgcaagaattctggaagctttagaaactgaaaagcaaaaaattgctaaagaagtacaaattctacagcagaatcggaataatagggataaaacttttacagtgcagacaacttggagctctatgaaactctcaatgatgattcaggaagccaatgctatcagcagcaaattgaaaacatactatgtttttggcagacatgatatatcagataaaagtagttctgacacttctattcgggttcgtaacctgaaactaggaatctcaacattctggagtctggaaaagtttgaatctaaacttgcagcaatgaaagaactttatgagagtaatggtagtaacaggggtgaagatgccttttgtgatcctgaagatgaatgggaacccgacattacagatgcaccagtttcttcactttctagaaggaggagtaggagtttgatgaagaacagaagaatttctggttgtttacatgacatacaagtccatccaattaagaatttgcattcttcacattcatcaggtttaatggacaaatcaagcactatttactcaaattcagcagagtcctttcttcctggaatttgcaaagaattgattggttcttcgttagatttttttggacagagttatgatgaagaaagaactatagcagacagcctaattaatagttttcttaaaatttataatgggctatttgccatttccaaggctcatgaagaacaagatgaagaaagtcaagataacttgttttcttctgatcgagcaatccagtcacttactattcagactgcatgtgcttttgagcagctagtagtgctaatgaaacactggctgagtgatttactgccttgtaccaacatagcaagacttgaggatgagttgagacaagaagttaaaaaactgggaggctacttacagttatttttgcagggatgctgtttggatatttcatcaatgataaaagaggctcaaaagaatgcaatccaaattgtacaacaagctgtaaagtatgtggggcagttagcagttctgaaagggagcaagctacattttctagaaaacggtaacaataaagctgccagtgtccaggaggaattcatggatgctgtttgtgatggtgtaggcttaggaatgaagattttattagattctggactggaaaaagcaaaagaacttcagcatgaactctttaggcagtgtacaaaaaatgaggttaccaaagaaatgaaaactaatgccatgggattgattagatctcttgaaaacatctttgctgaatcgaaaattaaaagtttcagaaggcaagtacaagaagaaaactttgaataccaagatttcaagaggatggttaatcgtgctccagaattcttaaagttaaaacattgcttagagaaagctattgaaattattatttctgcactgaaaggatgccatagtgatataaatcttctccagacttgtgttgaaagtattcgcaacttggccagtgatttttacagtgacttcagtgtgccttctacttctgttggcagctatgagagtagagtaactcacattgtccaccaggaactagaatctctagctaagtctctcctcttttgttttgaatctgaagaaagccctgatttgttgaaaccctgggaaacttataatcaaaataccaaagaagaacaccaacaatctaaatcaagcgggattgacggcagtaagaataaaggtgtaccaaagcgtgtctatgagctccatggctcatccccagcagtgagctcagaggaatgcacacccagtaggattcagtgggtgtgaatactgatgtgtaggcacttttatgaccacccatgaaagaaaaagaacacttgctcggtaattttctttatgcaggagagtttaagagaaatcagcacagatatttcaaaaaagtccatgtctttttatctttaaaatatctatttatcaaaggccagacacagtggctcacgcctgtaatcccagcactttgggaggcgggcagatcacaaggtcaggagtttgagaccggcctggccaacatggtgaaaccccgtctctactaaaaatacaaaaatttgctgggcatggtggcgcgtgcctgtaatcccagctactaggggggctgaggcaggaggatcgcttgaacctgagaggcagaggttgcagtgagccaagatcatgccactttactccagtctgagcaacagaacgagacttagtcaaaataaataaataaataagtaaataaataaataaataaaatatcttttatctttaaagtgtttaacattggtatactgtctgtagttggttcattagtcgtttataaagggttattttctcatgagtggaaacctgaacaatcagttacctttgtgcctatgccttctctctcctcagacagctgggatgtttatggtgaaatggcctgtacaagtttaactaagacaacttaacttgcattgttaatcaaaaattcttttctcaaagggttaactggttgccattttgaatagtatgttcaagggtgtagcttcctgtttctttccaaattataagtagctacctaaatatagtataattatatattaataatatggcttgctggcacagtagtttaccctgttatctgtgtttcataatgggggctgtatgaatattatttaaaactaataaaatgttgccagaattatactaaactgttggatgagattaggagatcagaggctggaccttctcttgataatgcttgttttgttaaaggtataatgaaataatttgtatatgatttgatgaagattaaagacccttattttccacagctttaaaaaaaaacctttatttatgatcaagtaataaagataatattctacttgtgggatcttacattatggaaatagtttgacgtttttgacctcaagagtatgtataatttgaagagatactttgtaactatgcttgggtgatattgagcagttcctaaagaataattcattt

SEQ ID NO: 38 - protein, 1648 aa, Homo sapiens
MSLHSTHNRNNSGDILDIPSSQNSSSLNALTHSSRLKLHLKSDMSECENDDPLLRSAGKVRDINRTYVISASRKTADMPLTPNPVGRLALQRRTTRNKESSLLVSELEDTTEKTAETRLTLQRRAKTDSAEKWKTAEIDSVKMTLNVGGETENNGVSKESRTNVRIVNNAKNSFVASSVPLDEDPQVIEMMADKKYKETFSAPSRANENVALKYSSNRPPIASLSQTEVVRSGHLTTKPTQSKLDIKVLGTGNLYHRSIGKEIAKTSNKFGSLEKRTPTKCTTEHKLTTKCSLPQLKSPAPSILKNRMSNLQVKQRPKSSFLANKQERSAENTILPEEETVVQNTSAGKDPLKVENSQVTVAVRVRPFTKREKIEKASQVVFMSGKEITVEHPDTKQVYNFIYDVSFWSFDECHPHYASQTTVYEKLAAPLLERAFEGFNTCLFAYGQTGSGKSYTMMGFSEEPGIIPRFCEDLFSQVARKQTQEVSYHIEMSFFEVYNEKIHDLLVCKDENGQRKQPLRVREHPVYGPYVEALSMNIVSSYADIQSWLELGNKQRATAATGMNDKSSRSHSVFTLVMTQTKTEFVEGEEHDHRITSRINLIDLAGSERCSTAHTNGDRLKEGVSINKSLLTLGKVISALSEQANQRSVFIPYRESVLTWLLKESLGGNSKTAMIATISPAASNIEETLSTLRYANQARLIVNIAKVNEDMNAKLIRELKAEIAKLKAAQRNSRNIDPERYRLCRQEITSLRMKLHQQERDMAEMQRVWKEKFEQAEKRKLQETKELQKAGIMFQMDNHLPNLVNLNEDPQLSEMLLYMIKEGTTTVGKYKPNSSHDIQLSGVLIADDHCTIKNFGGTVSIIPVGEAKTYVNGKHILEITVLRHGDRVILGGDHYFRFNHPVEVQKGKRPSGRDTPISEGPKDFEFAKNELLMAQRSQLEAEIKEAQLKAKEEMMQGIQIAKEMAQQELSSQKAAYESKIKALEAELREESQRKKMQEINNQKANHKIEELEKAKQHLEQEIYVNKKRLEMETLATKQALEDHSIRHARILEALETEKQKIAKEVQILQQNRNNRDKTFTVQTTWSSMKLSMMIQEANAISSKLKTYYVFGRHDISDKSSSDTSIRVRNLKLGISTFWSLEKFESKLAAMKELYESNGSNRGEDAFCDPEDEWEPDITDAPVSSLSRRRSRSLMKNRRISGCLHDIQVHPIKNLHSSHSSGLMDKSSTIYSNSAESFLPGICKELIGSSLDFFGQSYDEERTIADSLINSFLKIYNGLFAISKAHEEQDEESQDNLFSSDRAIQSLTIQTACAFEQLVVLMKHWLSDLLPCTNIARLEDELRQEVKKLGGYLQLFLQGCCLDISSMIKEAQKNAIQIVQQAVKYVGQLAVLKGSKLHFLENGNNKAASVQEEFMDAVCDGVGLGMKILLDSGLEKAKELQHELFRQCTKNEVTKEMKTNAMGLIRSLENIFAESKIKSFRRQVQEENFEYQDFKRMVNRAPEFLKLKHCLEKAIEIIISALKGCHSDINLLQTCVESIRNLASDFYSDFSVPSTSVGSYESRVTHIVHQELESLAKSLLFCFESEESPDLLKPWETYNQNTKEEHQQSKSSGIDGSKNKGVPKRVYELHGSSPAVSSEECTPSRIQWV

SEQ ID NO: 39 - DNA, 2255 bp, Homo sapiens
gcaggctctgcctgtggccactagcagagaagctgctgtccttccaccaccagcaccggaccacctgctccaagaccagcctcctggggggaccaggcacccggccttcactggcacccagggagccgtcctcagcagcgtcaacatgtcaaggcccagcagcagagccatttacttgcaccggaaggagtactcccagaacctcacctcagagcccaccctcctgcagcacagggtggagcacttgatgacatgcaagcaggggagtcagagagtccaggggcccgaggatgccttgcagaagctgttcgagatggatgcacagggccgggtgtggagccaagacttgatcctgcaggtcagggacggctggctgcagctgctggacattgagaccaaggaggagctggactcttaccgcctagacagcatccaggccatgaatgtggcgctcaacacatgttcctacaactccatcctgtccatcaccgtgcaggagccgggcctgccaggcactagcactctgctcttccagtgccaggaagtgggggcagagcgactgaagaccagcctgcagaaggctctggaggaagagctggagcaaagcagacctcgacttggaggccttcagccaggccaggacagatggagggggcctgctatggaaaggccgctccctatggagcaggcacgctatctggagccggggatccctccagaacagccccaccagaggaccctagagcacagcctcccaccatccccaaggcccctgccacgccacaccagtgcccgagaaccaagtgcctttactctgcctcctccaaggcggtcctcttcccccgaggacccagagagggacgaggaagtgctgaaccatgtcctaagggacattgagctgttcatgggaaagctggagaaggcccaggcaaagaccagcaggaagaagaaatttgggaaaaaaaacaaggaccagggaggtctcacccaggcacagtacattgactgcttccagaagatcaagtacagcttcaacctcctgggaaggctggccacctggctgaaggagacaagtgcccctgagctcgtacacatcctcttcaagtccctgaacttcatcctggccaggtgccctgaggctggcctagcagcccaagtgatctcacccctcctcacccctaaagctatcaacctgctacagtcctgtctaagcccacctgagagtaacctttggatggggttgggcccagcctggaccactagccgggccgactggacaggcgatgagcccctgccctaccaacccacattctcggatgactggcaacttccagagccctccagccaagcacccttaggataccaggaccctgtttcccttcggcggggaagtcataggttagggagcacctcacactttcctcaggagaagacacacaaccatgaccctcagcctggggaccccaactccaggccctccagccccaaacctgcccagccagccctgaaaatgcaagtcttgtacgagtttgaagctaggaacccacgggaactgactgtggtccagggagagaagctggaggttctggaccacagcaagcggtggtggctggtgaagaatgaggcgggacggagcggctacattccaagcaacatcctggagcccctacagccggggacccctgggacccagggccagtcaccctctcgggttccaatgcttcgacttagctcgaggcctgaagaggtcacagactggctgcaggcagagaacttctccactgccacggtgaggacacttgggtccctgacggggagccagctacttcgcataagacctggggagctacagatgctatgtccacaggaggccccacgaatcctgtcccggctggaggctgtcagaaggatgctggggataagcccttaggcaccagcttagacacctccaagaaccaggccccgctgatgcaagatggcagatctgatacccattagagccccgagaattcctcttctggatcccagtttgcagcaaaccccacaccccagctcacacagcaaaaacaatggacaggcccagagggtgaagcaaacagtgtcccttctggctgtgttggagcctccccagtaaccacctatttattttacctctttcccaaacctggagcatttatgcctaggcttgtcaagaatctgttcagtccctctccttctcaataaaagcatcttcaagcttgaaaaaaaaaaaaaaa

SEQ ID NO: 40 - protein, 594 aa, Homo sapiens [sequence omitted]

SEQ ID NO: 41 - DNA, 3600 bp, Homo sapiens
gaatcaacagaatttgtctttttgtgactggtttatttcacttaacttcatcctcaaggttcaacttaaaggtgtatccatgttgtagcacgtgtcagcattttctttcgttctcaggctaaatagtatttcattgtgtgtgtacaccatgtttcatgcattcattcatcccttgaaagattggtgggttgtttcctcctttttgcttttgtgaacagtgctacgaacatggttgtacaaacatctcttggagccccactagcagttcctttgggtatataccccaaagtggaattgctggatctggtagctccctttttaattttttgaggaatcgccacacagtttccataacagctgcaccattttacattcccaagaccttttttttttttttttttttaagaagaaaagatgtgtttctgcatttctggaagtctatgctgcatttccatttgttgaaatttaagaccagagtcatcttttctgctgtaattataatggtcactggcttgtgccttttcctcctctctctgccccatctgcacggggtctttgaacaagtcccagcaccttggtggacaagcctgtgtccctggcccatcatggaagccgctgcctttcagagtgggagtctgtaccctgttgcctcattccttgctgcgcccatgagtgagcttgtgcctgacctctccttccaggtggacttacacactgggctgtcggagttctcggtgacgcagcgccggctggcccatggctggaatgagtttgttgctgacaacagcgaacctgtgtggaagaaatacctggatcagtttaagaaccccctgatcctgctgctgctgggctctgccctggtgagtgtcctcaccaaggagtatgaggacgccgtcagcatcgccacggcagtgcttgtcgtggtcactgtcgccttcatccaggagtacaggtcggagaaatctctggaagagctgaccaagctggttcctccagaatgtaactgcctaagagaaggaaaactccagcacctgcttgctcgagaactggttcctggtgatgtcgtatctctctcgatcggagaccggatccctgcagacatccgactcactgaggtcacggacctcttggtggatgaatccagtttcaccggggaagccgagccatgtagtaaaacagacagccccttgacaggcggtggggacctcaccaccctcagcaacatcgtcttcatggggaccctggtgcagtatgggaggggccagggggtcgtgattggaacaggggaaagctctcagttcggagaagtgtttaagatgatgcaggctgaagagacacctaaaactcctttgcagaaaagcatggacaggctaggaaagcaactgacactcttctcctttggcataatcggtctcatcatgctcattggctggtcgcaagggaaacaactcctgagtatgttcacgatcggggtcagcctggctgtggcggctattccagagggtctgcccatcgtcgtcatggtgacgctggtcctgggagtgctgcggatggccaagaagcgggtcatcgtgaagaagttacccatcgtggagactttaggttgctgcagcgttctctgttctgacaagacggggactctgactgccaatgaaatgacagtgacccagcttgtaacgtcagatgggcttcgtgccgaggtcagcggagttgggtatgacggtcaagggactgtgtgtcttctaccatccaaggaagtcattaaggaattttccaatgtctcagtgggaaagttagtggaggcgggctgtgttgccaacaatgcggtcatcagaaagaacgccgtgatggggcagcccaccgagggtgcattgatggccctggcgatgaagatggacttaagtgatattaaaaattcatatataagaaaaaaagagattccattcagttcagagcagaagtggatggcggtgaaatgcagtctgaagactgaggatcaggaagacatttacttcatgaaaggggccttggaagaggtgatccgctactgcaccatgtacaacaacgggggcatccccctgccgctgacgccccagcagaggtcattctgcctgcaggaagagaagaggatggggtcgctcggtttgcgggtgctggccctggcttctgggcccgagctggggcggctgacgtttctaggtcttgtgggcatcattgaccccccgagagttggcgtgaaggaagcagtccaggttctctccgagtctggtgtgtctgtgaagatgataacgggggatgccctggagacggccttggccataggaagaaacatcggcctgtgcaacgggaagctgcaagccatgtccggggaggaggtggacagcgtggagaagggcgagctggccgaccgcgtggggaaggtgtccgtgttcttcaggaccagcccaaagcacaagctcaaaatcatcaaggctctgcaggagtcaggggcgatcgtggccatgactggggatggggtgaacgacgcagtggccctgaagtctgcagacattgggatcgccatggggcagacagggacggacgtcagcaaagaggccgccaacatgatcctggtggatgatgacttctcagccatcatgaatgcagtggaggaaggcaagggtattttttacaacatcaaaaactttgtccgattccagctgagcacgagcatctccgccctgagtctcatcactctgtccaccgtgttcaacctgcccagccccctcaacgccatgcagatcctatggatcaacatcatcatggatgggccaccggcgcagagcttgggggtagagcccgttgacaaagacgccttcaggcagccaccacggagtgtgcgggacaccatcctcagcagagccctcatcctgaagatcctcatgtccgcggccatcatcatcagcgggaccctctttatcttctggaaggagatgcctgaagacagagcaagcactccccgcaccacgacgatgacgttcacttgttttgtgtttttcgatctcttcaacgccttgacctgccgctctcagaccaagctgatatttgagatcggctttctcaggaaccacatgttcctctactccgtcctggggtccatcctggggcagctggcggtcatttacatccccccgctgcagagggtcttccagacggagaacctgggagcgcttgatttgctgtttttaactggattggcctcatccgtcttcattttgtcagagctcctcaaactatgtgaaaaatactgttgcagccccaagagagtccagatgcaccctgaagatgtgtagtggaccgcactccgcggcaccttccctaatcatctcgatctggttgtgactgtggcccctgccgtgtctcctcgtcaggggagacttttaggaggccgcagccttccatcaccggatcagtttttcctcttaggaaagctgcaggaacctcgtgggctccagggacccaggcccacatccatccagcgttcccgctggctgtgggacagacagggaggggcctgtacagaaacaccacactgtttattaaatcacaatgatttttatt

SEQ ID NO: 42 - protein, 963 aa, Homo sapiens
MLHFHLLKFKTRVIFSAVIIMVTGLCLFLLSLPHLHGVFEQVPAPWWTSLCPWPIMEAAAFQSGSLYPVASFLAAPMSELVPDLSFQVDLHTGLSEFSVTQRRLAHGWNEFVADNSEPVWKKYLDQFKNPLILLLLGSALVSVLTKEYEDAVSIATAVLVVVTVAFIQEYRSEKSLEELTKLVPPECNCLREGKLQHLLARELVPGDVVSLSIGDRIPADIRLTEVTDLLVDESSFTGEAEPCSKTDSPLTGGGDLTTLSNIVFMGTLVQYGRGQGVVIGTGESSQFGEVFKMMQAEETPKTPLQKSMDRLGKQLTLFSFGIIGLIMLIGWSQGKQLLSMFTIGVSLAVAAIPEGLPIVVMVTLVLGVLRMAKKRVIVKKLPIVETLGCCSVLCSDKTGTLTANEMTVTQLVTSDGLRAEVSGVGYDGQGTVCLLPSKEVIKEFSNVSVGKLVEAGCVANNAVIRKNAVMGQPTEGALMALAMKMDLSDIKNSYIRKKEIPFSSEQKWMAVKCSLKTEDQEDIYFMKGALEEVIRYCTMYNNGGIPLPLTPQQRSFCLQEEKRMGSLGLRVLALASGPELGRLTFLGLVGIIDPPRVGVKEAVQVLSESGVSVKMITGDALETALAIGRNIGLCNGKLQAMSGEEVDSVEKGELADRVGKVSVFFRTSPKHKLKIIKALQESGAIVAMTGDGVNDAVALKSADIGIAMGQTGTDVSKEAANMILVDDDFSAIMNAVEEGKGIFYNIKNFVRFQLSTSISALSLITLSTVFNLPSPLNAMQILWINIIMDGPPAQSLGVEPVDKDAFRQPPRSVRDTILSRALILKILMSAAIIISGTLFIFWKEMPEDRASTPRTTTMTFTCFVFFDLFNALTCRSQTKLIFEIGFLRNHMFLYSVLGSILGQLAVIYIPPLQRVFQTENLGALDLLFLTGLASSVFILSELLKLCEKYCCSPKRVQMHPEDV

SEQ ID NO: 43 - DNA, 2076 bp, Homo sapiens
ggcacgagggggaaaccgactcctgggagcagggaggaacgcgcgctccagagacaacttcgcggtgtggtgaactctctgaggaaaaacacgtgcgtggcaacaagtgactgagacctagaaatccaagcgttggaggtcctgaggccagcctaagtcgcttcaaaatggaacgaaggcgtttgtggggttccattcagagccgatacatcagcatgagtgtgtggacaagcccacggagacttgtggagctggcagggcagagcctgctgaaggatgaggccctggccattgccgccctggagttgctgcccagggagctcttcccgccactcttcatggcagcctttgacgggagacacagccagaccctgaaggcaatggtgcaggcctggcccttcacctgcctccctctgggagtgctgatgaagggacaacatcttcacctggagaccttcaaagctgtgcttgatggacttgatgtgctccttgcccaggaggttcgccccaggaggtggaaacttcaagtgctggatttacggaagaactctcatcaggacttctggactgtatggtctggaaacagggccagtctgtactcatttccagagccagaagcagctcagcccatgacaaagaagcgaaaagtagatggtttgagcacagaggcagagcagcccttcattccagtagaggtgctcgtagacctgttcctcaaggaaggtgcctgtgatgaattgttctcctacctcattgagaaagtgaagcgaaagaaaaatgtactacgcctgtgctgtaagaagctgaagatttttgcaatgcccatgcaggatatcaagatgatcctgaaaatggtgcagctggactctattgaagatttggaagtgacttgtacctggaagctacccaccttggcgaaattttctccttacctgggccagatgattaatctgcgtagactcctcctctcccacatccatgcatcttcctacatttccccggagaaggaagagcagtatatcgcccagttcacctctcagttcctcagtctgcagtgcctgcaggctctctatgtggactctttatttttccttagaggccgcctggatcagttgctcaggcacgtgatgaaccccttggaaaccctctcaataactaactgccggctttcggaaggggatgtgatgcatctgtcccagagtcccagcgtcagtcagctaagtgtcctgagtctaagtggggtcatgctgaccgatgtaagtcccgagcccctccaagctctgctggagagagcctctgccaccctccaggacctggtctttgatgagtgtgggatcacggatgatcagctccttgccctcctgccttccctgagccactgctcccagcttacaaccttaagcttctacgggaattccatctccatatctgccttgcagagtctcctgcagcacctcatcgggctgagcaatctgacccacgtgctgtatcctgtccccctggagagttatgaggacatccatggtaccctccacctggagaggcttgcctatctgcatgccaggctcagggagttgctgtgtgagttggggcggcccagcatggtctggcttagtgccaacccctgtcctcactgtggggacagaaccttctatgacccggagcccatcctgtgcccctgtttcatgcctaactagctgggtgcacatatcaaatgcttcattctgcatacttggacactaaagccaggatgtgcatgcatcttgaagcaacaaagcagccacagtttcagacaaatgttcagtgtgagtgaggaaaacatgttcagtgaggaaaaaacattcagacaaatgttcagtgaggaaaaaaaggggaagttggggataggcagatgttgacttgaggagttaatgtgatctttggggagatacatcttatagagttagaaatagaatctgaatttctaaagggagattctggcttgggaagtacatgtaggagttaatccctgtgtagactgttgtaaagaaactgttgaaaataaagagaagcaatgtgaaaaaaaaaaaaaaaaaa

SEQ ID NO: 44 - protein, 509 aa, Homo sapiens
MERRRLWGSIQSRYISMSVWTSPRRLVELAGQSLLKDEALAIAALELLPRELFPPLFMAAFDGRHSQTLKAMVQAWPFTCLPLGVLMKGQHLHLETFKAVLDGLDVLLAQEVRPRRWKLQVLDLRKNSHQDFWTVWSGNRASLYSFPEPEAAQPMTKKRKVDGLSTEAEQPFIPVEVLVDLFLKEGACDELFSYLIEKVKRKKNVLRLCCKKLKIFAMPMQDIKMILKMVQLDSIEDLEVTCTWKLPTLAKFSPYLGQMINLRRLLLSHIHASSYISPEKEEQYIAQFTSQFLSLQCLQALYVDSLFFLRGRLDQLLRHVMNPLETLSITNCRLSEGDVMHLSQSPSVSQLSVLSLSGVMLTDVSPEPLQALLERASATLQDLVFDECGITDDQLLALLPSLSHCSQLTTLSFYGNSISISALQSLLQHLIGLSNLTHVLYPVPLESYEDIHGTLHLERLAYLHARLRELLCELGRPSMVWLSANPCPHCGDRTFYDPEPILCPCFMPN

SEQ ID NO: 45 - DNA, 1445 bp, Homo sapiens
gcggggagccggcccggagcgcagtttccagtggggccggggtttcacccgggccctctctgtttgaaccgaacccgacaaatgggcgcatgacgatggagagcagggaaatggactgctatctccgtcgcctcaaacaggagctgatgtccatgaaggaggtgggtgatggcttacaggatcagatgaactgcatgatgggtgcactgcaagaactgaagctcctccaggtgcagacagcactggaacagctggagatctctggagggggtcctgtgccaggcagccctgaaggtcccaggacccagtgcgagcacccttgttgggagggtggcagaggtcctgccaggcccacagtctgttccccctccagtcaaccttctcttggcagcagcaccaagtttccatcccataggagtgtctgtggaagggatttagcccccttgcccaggacacagccacatcaaagctgtgctcagcaggggccagagcgagtggaaccggatgactggacctccacgttgatgtcccggggccggaatcgacagcctctggtgttaggggacaacgtttttgcagacctggtgggcaattggctagacttgccagaactggagaagggtggggagaagggtgagactgggggggcacgtgaacccaaaggagagaaaggccagccccaggagctgggccgcaggttcgccctgacagcaaacatctttaagaagttcttgcgtagtgtgcggcctgaccgtgaccggctgctgaaggagaagccaggctgggtgacacccatggtccctgagtcccgaaccggccgctcacagaaggtcaagaagcggagcctttccaagggctctggacatttccccttcccaggcaccggggagcacaggcgaggggagaatccccccacaagctgccccaaggccctggagcactcaccctcaggatttgatattaacacagctgtttgggtctgaatcctagagacagaaagttgactgagcctgaaagggccaggtcccagtgctgggcccctggggaggagggagggtgggcggtatggctctcgaaagcccaactccaagttcctttcccccagaaagcggggagaagccagagttcttggctcaggactgaagggaaggtggttgggagaggctgtcttgggggctagctggtggaggaggtaagagtagctggagagtgagctgtgcgtgtgtgtgtgtgtgtgtgcatgtgtgtgtctgtctggcatgcatgcactcactttggggctggaggtgacagtaggtgagggcagaggaggagatcagaaaatccctctgacatctccactgcccccaaagacctccgttgaacattctgtatggaaaagagccctggagcatcaggttccccagataggcccccaaataaagacctgtctatggctctcccaa

SEQ ID NO: 46 - protein, 297 aa, Homo sapiens
MTMESREMDCYLRRLKQELMSMKEVGDGLQDQMNCMMGALQELKLLQVQTALEQLEISGGGPVPGSPEGPRTQCEHPCWEGGRGPARPTVCSPSSQPSLGSSTKFPSHRSVCGRDLAPLPRTQPHQSCAQQGPERVEPDDWTSTLMSRGRNRQPLVLGDNVFADLVGNWLDLPELEKGGEKGETGGAREPKGEKGQPQELGRRFALTANIFKKFLRSVRPDRDRLLKEKPGWVTPMVPESRTGRSQKVKKRSLSKGSGHFPFPGTGEHRRGENPPTSCPKALEHSPSGFDINTAVWV

SEQ ID NO: 47 - DNA, 1919 bp, Homo sapiens
ggagctccccgcatcctgcagtgcattgcccaggagaaagtgatccctgcacttgcctgtctgggacaagggaaggggccaaacaaaacacccgtggctgccatctgcctgaccagcttggtgaccatggcctttgtttttgtgggtcaagtgaacgttctggcccccatcgtcaccatcaacttcatgctgacatacgttgcagtggactactcttacttctccctgtccatgtgttcctgcagcctgaccccggtgcctgagccggtgctcagggagggcgcagaaggcctccactgctctgagcacctgctcttagagaaagctcccagttacggctctgagggacctgcccaaagagtcttggagggcacgctactggaattcaccaaggacatggatcagctcctccagctaaccaggaagcttgagagtagccagcccaggcaaggagagggtaacaggaccccagaaagtcagaagaggaaaagcaagaaggccaccaagcagaccctacaagatagcttcctcttggacctcaaatcccctccttctttccctgtcgagatctctgacaggttgcccgctgcctcctgggaggggcaggagtcctgctggaacaagcagacttccaagagcgaagggactcagcctgagggaacatatggagagcaacttgttcctgagctgtgcaaccaatcagagtccagtggagaagatttcttcctgaagtccaggctccaagaacaagatgtctggagaagatccacttctttctatacccacatgtgcaacccctgggtctccctgttgggggctgttgggtcccttctcatcatgtttgtgatacagtgggtgtataccctggttaacatgggtgttgctgccatcgtgtatttctacattggccgggccagtccagggcttcaccttggatcagcctccaacttcagctttttccggtggatgaggtctctcttgctcccctcctgcaggagcttgcagtccccccaggagcagatcatcttggcgccgtccctggctaaggttgacatggagatgactcagctcacccaggagaatgcagacttcgccactcgggatcgctaccaccactcctccctcgtgaaccgggagcagctgatgcctcactactagatgcagtgctgggaccttcctcttttggagctgtcccatgtacagtggacccaagcccaggaccttcgtggagctgcttctccaacctgagaaactcaagacccatcctcccgctgtcactttggacaatggaaatctacattttcttttccctttttttttttttttgagacagagtctcgccttgtcacccaggctggagtccagtggcacaatcttggctcactgcaacctctgcttcccgagttcaagcaattctcctgcctcagcctcctgagtagctgggattataggcatgcaccaccacacccagctattttttgtatttttactggagacagggtttcaccatgttggccaggctggtctcgaactcctgacctcgtgatccacccgtctcagcctcccaaagtactgggattacaggcgtgagccaccatgcctggccagaaatctatgttttcttagaacatgtggaagaaggaaaaagacaaaaaaggaagtctggattctgaggaccacgtctcacccagggtgacatcaggaatggtgctagcctctgcaacacgacacccagtctgaagagctctatacaggtactaagactagcaggggacaccaagactctgcacaaccagattgcttgtgcagagggccacaataagtgtatgttttatattttattgtattatttattcaaaaataaataatacactcacatgtttccacacccaaaaaaaaaaaaaaaaaaaaaaaaaaaa

SEQ ID NO: 48 - protein, 308 aa, Homo sapiens
MCSCSLTPVPEPVLREGAEGLHCSEHLLLEKAPSYGSEGPAQRVLEGTLLEFTKDMDQLLQLTRKLESSQPRQGEGNRTPESQKRKSKKATKQTLQDSFLLDLKSPPSFPVEISDRLPAASWEGQESCWNKQTSKSEGTQPEGTYGEQLVPELCNQSESSGEDFFLKSRLQEQDVWRRSTSFYTHMCNPWVSLLGAVGSLLIMFVIQWVYTLVNMGVAAIVYFYIGRASPGLHLGSASNFSFFRWMRSLLLPSCRSLQSPQEQIILAPSLAKVDMEMTQLTQENADFATRDRYHHSSLVNREQLMPHY

SEQ ID NO: 49 - DNA, 772 bp, Homo sapiens
tgtctttagtttactcagcatcagctactaacatacctgaacgaagatcttgttctaagacattgtatgtgaagatgatacctgcaaaagacatggctaaagttatgattgtcatgttggcaatttgttttcttacaaaatcggatgggaaatctgttaagaagagatctgtgagtgaaatacagcttatgcataacctgggaaaacatctgaactcgatggagagagtagaatggctgcgtaagaagctgcaggatgtgcacaattttgttgcccttggagctcctctagctcccagagatgctggttcccagaggccccgaaaaaaggaagacaatgtcttggttgagagccatgaaaaaagtcttggagaggcagacaaagctgatgtgaatgtattaactaaagctaaatcccagtgaaaatgaaaacagatattgtcagagttctgctctagacagtgtagggcaacaatacatgctgctaattcaaagctctattaagatttccaagtgccaatatttctgatataacaaactacatgtaatccatcactagccatgataactgcaattttaattgattattctgattccacttttattcatttgagttattttaattatcttttctattgtttattctttttaaagtatgttattgcataatttataaaagaataaaattcgacttttaaacctctcttctaccttaaaatgtaaaacaaaaatgtaatgatcataagtctaaataaatgaagtatttctcactc

SEQ ID NO: 50 - protein, 115 aa, Homo sapiens
MIPAKDMAKVMIVMLAICFLTKSDGKSVKKRSVSEIQLMHNLGKHLNSMERVEWLRKKLQDVHNFVALGAPLAPRDAGSQRPRKKEDNVLVESHEKSLGEADKADVNVLTKAKSQ

SEQ ID NO: 51 - DNA, 1742 bp, Homo sapiens
gttagagagaagcgagctgctgtctgaccagcagcttgggattggtggaaggaagcaggccaggccctgtgaggagtcaaggttctgagcagacaggccaaccggaggacaggattccctggaggccacagaggagcaccaaggagaagatctgcctgtgggtccccattgcccagcttttgcctgcactcttgcctgctgccctgagcagagtcatcatgtcttctgagcagaagagtcagcactgcaagcctgaggaaggcgttgaggcccaagaagaggccctgggcctggtgggtgcacaggctcctactactgaggagcaggaggctgctgtctcctcctcctctcctctggtccctggcaccctggaggaagtgcctgctgctgagtcagcaggtcctccccagagtcctcagggagcctctgccttacccactaccatcagcttcacttgctggaggcaacccaatgagggttccagcagccaagaagaggaggggccaagcacctcgcctgacgcagagtccttgttccgagaagcactcagtaacaaggtggatgagttggctcattttctgctccgcaagtatcgagccaaggagctggtcacaaaggcagaaatgctggagagagtcatcaaaaattacaagcgctgctttcctgtgatcttcggcaaagcctccgagtccctgaagatgatctttggcattgacgtgaaggaagtggaccccaccagcaacacctacacccttgtcacctgcctgggcctttcctatgatggcctgctgggtaataatcagatctttcccaagacaggccttctgataatcgtcctgggcacaattgcaatggagggcgacagcgcctctgaggaggaaatctgggaggagctgggtgtgatgggggtgtatgatgggagggagcacactgtctatggggagcccaggaaactgctcacccaagattgggtgcaggaaaactacctggagtaccggcaggtacccggcagtaatcctgcgcgctatgagttcctgtggggtccaagggctctggctgaaaccagctatgtgaaagtcctggagcatgtggtcagggtcaatgcaagagttcgcattgcctacccatccctgcgtgaagcagctttgttagaggaggaagagggagtctgagcatgagttgcagccagggctgtggggaaggggcagggctgggccagtgcatctaacagccctgtgcagcagcttcccttgcctcgtgtaacatgaggcccattcttcactctgtttgaagaaaatagtcagtgttcttagtagtgggtttctattttgttggatgacttggagatttatctctgtttccttttacaattgttgaaatgttccttttaatggatggttgaattaacttcagcatccaagtttatgaatcgtagttaacgtatattgctgttaatatagtttaggagtaagagtcttgttttttattcagattgggaaatccgttctattttgtgaatttgggacataataacagcagtggagtaagtatttagaagtgtgaattcaccgtgaaataggtgagataaattaaaagatacttaattcccgccttatgcctcagtctattctgtaaaatttaaaaaatatatatgcatacctggatttccttggcttcgtgaatgtaagagaaattaaatctgaataaataattctttctgttaaaaaaaaaaaaaaaaaaaa

SEQ ID NO: 52 - protein, 317 aa, Homo sapiens
MSSEQKSQHCKPEEGVEAQEEALGLVGAQAPTTEEQEAAVSSSSPLVPGTLEEVPAAESAGPPQSPQGASALPTTISFTCWRQPNEGSSSQEEEGPSTSPDAESLFREALSNKVDELAHFLLRKYRAKELVTKAEMLERVIKNYKRCFPVIFGKASESLKMIFGIDVKEVDPTSNTYTLVTCLGLSYDGLLGNNQIFPKTGLLIIVLGTIAMEGDSASEEEIWEELGVMGVYDGREHTVYGEPRKLLTQDWVQENYLEYRQVPGSNPARYEFLWGPRALAETSYVKVLEHVVRVNARVRIAYPSLREAALLEEEEGV

SEQ ID NO: 53 - DNA, 1833 bp, Homo sapiens
ggcacgaggctgggggtcagagagaagggagaggcctccttctgaggggcggcttgataccggtggaggagctccaggaagcaggcaggccttggtctgagacagtgtcctcaggtcgcagagcagaggagacccaggcagtgtcagcagtgaaggttctcgggacaggctaaccaggaggacaggagccccaagaggccccagagcagcactgacgaagacctgcctgtgggtctccatcgcccagctcctgcccacgctcctgactgctgccctgaccagagtcatcatgtctctcgagcagaggagtccgcactgcaagcctgatgaagaccttgaagcccaaggagaggacttgggcctgatgggtgcacaggaacccacaggcgaggaggaggagactacctcctcctctgacagcaaggaggaggaggtgtctgctgctgggtcatcaagtcctccccagagtcctcagggaggcgcttcctcctccatttccgtctactacactttatggagccaattcgatgagggctccagcagtcaagaagaggaagagccaagctcctcggtcgacccagctcagctggagttcatgttccaagaagcactgaaattgaaggtggctgagttggttcatttcctgctccacaaatatcgagtcaaggagccggtcacaaaggcagaaatgctggagagcgtcatcaaaaattacaagcgctactttcctgtgatcttcggcaaagcctccgagttcatgcaggtgatctttggcactgatgtgaaggaggtggaccccgccggccactcctacatccttgtcactgctcttggcctctcgtgcgatagcatgctgggtgatggtcatagcatgcccaaggccgccctcctgatcattgtcctgggtgtgatcctaaccaaagacaactgcgcccctgaagaggttatctgggaagcgttgagtgtgatgggggtgtatgttgggaaggagcacatgttctacggggagcccaggaagctgctcacccaagattgggtgcaggaaaactacctggagtaccggcaggtgcccggcagtgatcctgcgcactacgagttcctgtggggttccaaggcccacgctgaaaccagctatgagaaggtcataaattatttggtcatgctcaatgcaagagagcccatctgctacccatccctttatgaagaggttttgggagaggagcaagagggagtctgagcaccagccgcagccggggccaaagtttgtggggtcagggccccatccagcagctgccctgccccatgtgacatgaggcccattcttcgctctgtgtttgaagagagcaatcagtgttctcagtggcagtgggtggaagtgagcacactgtatgtcatctctgggttccttgtctattgggtgatttggagatttatccttgctcccttttggaattgttcaaatgttcttttaatggtcagtttaatgaacttcaccatcgaagttaatgaatgacagtagtcacacatattgctgtttatgttatttaggagtaagattcttgcttttgagtcacatggggaaatccctgttattttgtgaattgggacaagataacatagcagaggaattaataatttttttgaaacttgaacttagcagcaaaatagagctcataaagaaatagtgaaatgaaaatgtagttaattcttgccttatacctctttctctctcctgtaaaattaaaacatatacatgtatacctggatttgcttggcttctttgagcatgtaagagaaataaaaattgaaagaataaaaaaaaaaaaaaaaaaa

SEQ ID NO: 54 - protein, 315 aa, Homo sapiens
MSLEQRSPHCKPDEDLEAQGEDLGLMGAQEPTGEEEETTSSSDSKEEEVSAAGSSSPPQSPQGGASSSISVYYTLWSQFDEGSSSQEEEEPSSSVDPAQLEFMFQEALKLKVAELVHFLLHKYRVKEPVTKAEMLESVIKNYKRYFPVIFGKASEFMQVIFGTDVKEVDPAGHSYILVTALGLSCDSMLGDGHSMPKAALLIIVLGVILTKDNCAPEEVIWEALSVMGVYVGKEHMFYGEPRKLLTQDWVQENYLEYRQVPGSDPAHYEFLWGSKAHAETSYEKVINYLVMLNAREPICYPSLYEEVLGEEQEGV

SEQ ID NO: 55 - DNA, 503 bp, Homo sapiens
gacagcggcttccttgatccttgccacccgcgactgaacaccgacagcagcagcctcaccatgaagttgctgatggtcctcatgctggcggccctctcccagcactgctacgcaggctctggctgccccttattggagaatgtgatttccaagacaatcaatccacaagtgtctaagactgaatacaaagaacttcttcaagagttcatagacgacaatgccactacaaatgccatagatgaattgaaggaatgttttcttaaccaaacggatgaaactctgagcaatgttgaggtgtttatgcaattaatatatgacagcagtctttgtgatttattttaactttctgcaagacctttggctcacagaactgcagggtatggtgagaaaccaactacggattgctgcaaaccacaccttctctttcttatgtctttttactacaaactacaagacaattgttgaaacctgctatacatgtttattttaataaattgatggca

SEQ ID NO: 56 - protein, 93 aa, Homo sapiens
MKLLMVLMLAALSQHCYAGSGCPLLENVISKTINPQVSKTEYKELLQEFIDDNATTNAIDELKECFLNQTDETLSNVEVFMQLIYDSSLCDLF

SEQ ID NO: 57 - DNA, 786 bp, Homo sapiens
atggattgggggacgctgcacactttcatcgggggtgtcaacaaacactccaccagcatcgggaaggtgtggatcacagtcatctttattttccgagtcatgatcctagtggtggctgcccaggaagtgtggggtgacgagcaagaggacttcgtctgcaacacactgcaaccgggatgcaaaaatgtgtgctatgaccactttttcccggtgtcccacatccggctgtgggccctccagctgatcttcgtctccaccccagcgctgctggtggccatgcatgtggcctactacaggcacgaaaccactcgcaagttcaggcgaggagagaagaggaatgatttcaaagacatagaggacattaaaaagcacaaggttcggatagaggggtcgctgtggtggacgtacaccagcagcatctttttccgaatcatctttgaagcagcctttatgtatgtgttttacttcctttacaatgggtaccacctgccctgggtgttgaaatgtgggattgacccctgccccaaccttgttgactgctttatttctaggccaacagagaagaccgtgtttaccatttttatgatttctgcgtctgtgatttgcatgctgcttaacgtggcagagttgtgctacctgctgctgaaagtgtgttttaggagatcaaagagagcacagacgcaaaaaaatcaccccaatcatgccctaaaggagagtaagcagaatgaaatgaatgagctgatttcagatagtggtcaaaatgcaatcacaggtttcccaagctaa

SEQ ID NO: 58 - protein, 261 aa, Homo sapiens
MDWGTLHTFIGGVNKHSTSIGKVWITVIFIFRVMILVVAAQEVWGDEQEDFVCNTLQPGCKNVCYDHFFPVSHIRLWALQLIFVSTPALLVAMHVAYYRHETTRKFRRGEKRNDFKDIEDIKKHKVRIEGSLWWTYTSSIFFRIIFEAAFMYVFYFLYNGYHLPWVLKCGIDPCPNLVDCFISRPTEKTVFTIFMISASVICMLLNVAELCYLLLKVCFRRSKRAQTQKNHPNHALKESKQNEMNELISDSGQNAITGFPS

SEQ ID NO: 59 - DNA, 1064 bp, Homo sapiens
attagaatttatcatcagggaagatatcttttatgttgagcagctgctatctgatcttgacagactgtcctcttagaggactgttgaagtccattctagtcattttgtaacttcataactgcagaaagaaatgatgcaaggactgtttagtggactgagatggctgagcaggttcttggcctgaattatccagaggagataggtggatctagcttcagaggaagtctacaccccattcccttctgcttacaatgtacccatgatatgtgtttagcacagtaatactgtaacaggacatcacatggaaaaatcaaagcagctggctcactgtatttaactgaaaagaatgcctacagattggatatttaatagggaaaattaaggcactttaataacaaacttcattatgtgaaacttgttgaatattaacatacaatataccttgtatattaatgccatagtttttagtaacactaatttaaacaacaaatttaaggggtgctggcatatcccagtgacaccttcagttttattgctgcttagtattttctagtaaattagttttaattattggcagtctgttgggcaccatttgggaaagaaataaattggtctcagtgtagcagacttgtagccaaaaactttgaattaaaaataagtataataacagaatattatttcatttttaaaggaattgtattatttttgaagtgctgtgcgggtgataatggtttcggctggggtctctatccccaccccccctattaaatttgtaatctcccctaaattttccacacggggaagtgcccccccctgggctcccccccctgcaaccaatggcaccccccccccccttctatccctcatcccccccccgtttcccccttcttcttccccccccccctttcctcccgtctccatttcccgccttaccccgctttccccctattctacaaaccacccccccctccctcccctctatcgtcccccgccgcctatatatataaaccccactgcttctctgtcctttccccctttattttcccccacaccgtcttaccccc

SEQ ID NO: 60 - protein, 112 aa, Homo sapiens
MVSAGVSIPTPPIKFVISPKFSTRGSAPPWAPPPATNGTPPPLLSLIPPPFPPSSSPPPFPPVSISRLTPLSPYSTNHPPLPPLYRPPPPIYINPTASLSFPPLFSPTPSYP

SEQ ID NO: 61 - DNA, 2511 bp, Homo sapiens
ccgacgccgcagctcagactccgctcagccatggccgggccgcgcgcgtgcgccccgctcctgctcctgctcctgctcggggagcttctggcggccgccggggcgcagagagtgggactccccggcccccccggccccccagggccgcccggcaagcccggccaggacggcattgacggagaagctggtcctccaggtctgcctgggcccccgggaccaaagggggccccaggaaagccggggaaaccaggagaggctgggctgccgggactgccgggtgtggatggtctgactggacgagatggaccccctggacccaagggtgcccctggggaacggggaagtctgggacccccggggccgcccgggctggggggcaaaggcctccctggaccccccggagaggcaggagtgagcggccccccaggtgggatcggcctccgcggccccccgggacctcctggactccccggcctccctggtcccccaggacctcccggaccccctggacacccaggagttctccctgaaggcgctactgaccttcagtgcccaagtatctgcccgccaggtcccccagggccccctggaatgccagggttcaagggacccactggctacaaaggcgagcagggggaagtcggcaaggacggcgagaagggtgaccctggcccccctgggcccgccggcctcccgggcagcgtggggctgcagggcccccggggattacgaggactgccagggccactcgggccccctggggaccggggtcccattgggttccgagggccgcctgggatcccaggagcgcctgggaaagcgggtgaccgaggcgagaggggcccagaagggttccgcggccccaagggtgacctcggcagacctggtcccaagggaacccccggagtggccgggccaagcggagagccgggcatgccgggcaaggacggccagaatggcgtgccaggactcgatggccagaagggagaggctggtcgcaacggtgctccgggagagaagggccccaacgggctgccgggcctccctggacgagcggggtccaaaggcgagaagggagaacggggcagagctggggagctgggtgaggccggcccctctggagagccaggcgtccctggagatgctggcatgcctggggagcgcggtgaggctggccaccggggctcagcgggggccctcggcccacaaggccctcccggagcccctggtgtccgaggcttccagggccagaagggcagcatgggagaccccggccttccaggcccccagggcctccgaggtgacgtgggcgaccggggtccgggaggtgccgcaggccctaagggagaccagggtattgcaggttccgacggtcttcctggggataaaggagaactgggtcccagcggcctggtcggacccaaaggagagtctggcagtcgaggggagctgggccccaaaggcacccagggtcccaacggcaccagcggtgttcagggtgtccccgggccccccggtcctctgggcctgcagggcgtcccgggtgttcctggcatcacggggaagccgggagttccggggaaggaggccagcgagcagcgcatcagggagctgtgtggggggatgatcagcgaacaaattgcacagttagccgcgcacctaaggaagcctttggcacccgggtccattggtcggcccggtccagctggcccccctgggcccccaggacccccaggctccattggtcaccctggcgctcgaggaccccctggataccgcggtcccactggggagctgggagaccccgggcccagaggaaaccagggtgacagaggagacaaaggcgcggcaggagcagggctggacgggcctgaaggagaccaggggccccaaggaccccaaggcgtgcccggcaccagcaaggacggccaggacggtgctcccggcgagcctgggcctcccggagatcctgggcttccaggtgccattggggcccaggggacaccggggatctgcgacacctcagcctgccaaggagccgtgttaggaggggtcggggagaaatcaggctctcgaagctcataaaattcaacgtgaggaagcaagtgacaaggacgcccgaagcacagtggacggtcatgaaggagcgggggtgtggcaggcgggtgacgtccaggagagggagcgcccctggctgcccctcggccgccgactggacgcgcgggccttgccagcgagcaccctcatcgggctgtcgcctgacagcatacctcaaaaggccctagctaataaacctgtaagcccagcatttgagagaaggtagggtgtgtatatataaaaggttgtgtacaactccacgaggtgaaaaatattcagtaacttgtttacatagcatttgtgtaaagactatgatctcatcccaataaaatgatatattaaaccttcagattaatgactggctacagagtaacaaaaaataaagaatttaatgtacagtaaattctctcccat

SEQ ID NO: 62 - protein, 684 aa, Homo sapiens
MAGPRACAPLLLLLLLGELLAAAGAQRVGLPGPPGPPGPPGKPGQDGIDGEAGPPGLPGPPGPKGAPGKPGKPGEAGLPGLPGVDGLTGRDGPPGPKGAPGERGSLGPPGPPGLGGKGLPGPPGEAGVSGPPGGIGLRGPPGPPGLPGLPGPPGPPGPPGHPGVLPEGATDLQCPSICPPGPPGPPGMPGFKGPTGYKGEQGEVGKDGEKGDPGPPGPAGLPGSVGLQGPRGLRGLPGPLGPPGDRGPIGFRGPPGIPGAPGKAGDRGERGPEGFRGPKGDLGRPGPKGTPGVAGPSGEPGMPGKDGQNGVPGLDGQKGEAGRNGAPGEKGPNGLPGLPGRAGSKGEKGERGRAGELGEAGPSGEPGVPGDAGMPGERGEAGHRGSAGALGPQGPPGAPGVRGFQGQKGSMGDPGLPGPQGLRGDVGDRGPGGAAGPKGDQGIAGSDGLPGDKGELGPSGLVGPKGESGSRGELGPKGTQGPNGTSGVQGVPGPPGPLGLQGVPGVPGITGKPGVPGKEASEQRIRELCGGMISEQIAQLAAHLRKPLAPGSIGRPGPAGPPGPPGPPGSIGHPGARGPPGYRGPTGELGDPGPRGNQGDRGDKGAAGAGLDGPEGDQGPQGPQGVPGTSKDGQDGAPGEPGPPGDPGLPGAIGAQGTPGICDTSACQGAVLGGVGEKSGSRSS

SEQ ID NO: 63 - DNA, 1441 bp, Homo sapiens
ctccaaaaccctcgtcgacatggacatggccgactacagtgctgcactggacccagcctacaccaccctggaatttgagaatgtgcaggtgttgacgatgggcaatgacacgtccccatcagaaggcaccaacctcaacgcgcccaacagcctgggtgtcagcgccctgtgtgccatctgcggggaccgggccacgggcaaacactacggtgcctcgagctgtgacggctgcaagggcttcttccggaggagcgtgcggaagaaccacatgtactcctgcagatttagccggcagtgcgtggtggacaaagacaagaggaaccagtgccgctactgcaggctcaagaaatgcttccgggctggcatgaagaaggaagccgtccagaatgagcgggaccggatcagcactcgaaggtcaagctatgaggacagcagcctgccctccatcaatgcgctcctgcaggcggaggtcctgtcccgacagatcacctcccccgtctccgggatcaacggcgacattcgggcgaagaagattgccagcatcgcagatgtgtgtgagtccatgaaggagcagctgctggttctcgttgagtgggccaagtacatcccagctttctgcgagctccccctggacgaccaggtggccctgctcagagcccatgctggcgagcacctgctgctcggagccaccaagagatccatggtgttcaaggacgtgctgctcctaggcaatgactacattgtccctcggcactgcccggagctggcggagatgagccgggtgtccatacgcatccttgacgagctggtgctgcccttccaggagctgcagatcgatgacaatgagtatgcctacctcaaagccatcatcttctttgacccagatgccaaggggctgagcgatccagggaagatcaagcggctgcgttcccaggtgcaggtgagcttggaggactacatcaacgaccgccagtatgactcgcgtggccgctttggagagctgctgctgctgctgcccaccttgcagagcatcacctggcagatgatcgagcagatccagttcatcaagctcttcggcatggccaagattgacaacctgttgcaggagatgctgctgggagggtcccccagcgatgcaccccatgcccaccaccccctgcaccctcacctgatgcaggaacatatgggaaccaacgtcatcgttgccaacacaatgcccactcacctcagcaacggacagatgtgtgagtggccccgacccaggggacaggcagccacccctgagaccccacagccctcaccgccaggtgcgtcagggtctgagccctataagctcctgccgggagccgtcgccacaatcgtcaagcccctctctgccatcccccagccgaccatcaccaagcaggaagttatctagcaagccgctggggcttgggggctc

SEQ ID NO: 64 - protein, 465 aa, Homo sapiens
MDMADYSAALDPAYTTLEFENVQVLTMGNDTSPSEGTNLNAPNSLGVSALCAICGDRATGKHYGASSCDGCKGFFRRSVRKNHMYSCRFSRQCVVDKDKRNQCRYCRLKKCFRAGMKKEAVQNERDRISTRRSSYEDSSLPSINALLQAEVLSRQITSPVSGINGDIRAKKIASIADVCESMKEQLLVLVEWAKYIPAFCELPLDDQVALLRAHAGEHLLLGATKRSMVFKDVLLLGNDYIVPRHCPELAEMSRVSIRILDELVLPFQELQIDDNEYAYLKAIIFFDPDAKGLSDPGKIKRLRSQVQVSLEDYINDRQYDSRGRFGELLLLLPTLQSITWQMIEQIQFIKLFGMAKIDNLLQEMLLGGSPSDAPHAHHPLHPHLMQEHMGTNVIVANTMPTHLSNGQMCEWPRPRGQAATPETPQPSPPGASGSEPYKLLPGAVATIVKPLSAIPQPTITKQEVI

SEQ ID NO: 65 - DNA, 1323 bp, Homo sapiens
atggagcagacgtatggcgaggtgaaccagctgggcggtgtgttcgtcaacggccgccccctgcccaacgccatccgcttgcgcattgtggagctggcgcagctgggcatccgaccctgtgacatcagtcggcagctccgcgtatcccacggctgcgtgagcaagatcctggcgcgctacaacgagaccggctccattctgcccggggccatcggggggagcaagccccgcgtcaccactcccaacgtggtcaagcacatccgggactacaagcaaggagaccctggcatctttgcctgggagatccgcgaccggctgctggccgacggcgtctgtgacaagtacaatgtgccttcggtgagctccatcagccgcatcctgcgcaacaagatcggcagcctggcgcagcccggaccgtacgaggcaagtaagcagccgccgtcgcagcctacgctgccctacaaccacatctaccagtacccctaccccagtcccgtgtcgcccacgggcgccaagatgggcagccaccccggggtcccgggcacggcgggccacgtcagcatcccgcgctcatggccctcggcacactcggtcagcaacatcctgggcatccggacgtttatggagcaaacaggggccctggctgggagcgaaggcaccgcttactctcccaagatggaagactgggccggcgtgaaccgcacggccttccccgccacccccgcagtgaatgggctagagaaacctgccttagaggcagacattaaatacactcagtcggcctccaccctctctgccgtgggcggctttctccccgcctgcgcctacccggcctccaaccagcacggcgtgtacagcgccccgggcggcggctacctcgccccgggcccgccgtggccgcctgcgcaaggtcctcctctggcgccccccggggccggcgtagctgtgcatggcggggaactcgcggcagcaatgaccttcaagcatcccagccgagaaggaagcctcccagctccggcagcaaggccccggacgccctcagtagcttacacggactgcccatcccggcctcgacctcctaggggcagctctccccggacccgagcccggagggaacggcaggcggacccgggcgcacaggtctgcgcggcggccccggcaatcggcacgggcaggatcggaggactcgcggaggaggaagccagtgccggcccgcggggtgcacgcccagccagcccccaggcccagccctgcctctggccggacccaccacacttcctttattggtctgggtttttaggcttctctgaacttgggttttag

SEQ ID NO: 66 - protein, 440 aa, Homo sapiens
MEQTYGEVNQLGGVFVNGRPLPNAIRLRIVELAQLGIRPCDISRQLRVSHGCVSKILARYNETGSILPGAIGGSKPRVTTPNVVKHIRDYKQGDPGIFAWEIRDRLLADGVCDKYNVPSVSSISRILRNKIGSLAQPGPYEASKQPPSQPTLPYNHIYQYPYPSPVSPTGAKMGSHPGVPGTAGHVSIPRSWPSAHSVSNILGIRTFMEQTGALAGSEGTAYSPKMEDWAGVNRTAFPATPAVNGLEKPALEADIKYTQSASTLSAVGGFLPACAYPASNQHGVYSAPGGGYLAPGPPWPPAQGPPLAPPGAGVAVHGGELAAAMTFKHPSREGSLPAPAARPRTPSVAYTDCPSRPRPPRGSSPRTRARRERQADPGAQVCAAAPAIGTGRIGGLAEEEASAGPRGARPASPQAQPCLWPDPPHFLYWSGFLGFSELGF

SEQ ID NO: 67 - DNA, 416 bp, Homo sapiens
ttatcttaagagtctttatttaacacatatagtacacattttcagtcatttcatcatcatccaagtacattaagatacatacccatgtatattacaaggcttattgttcactcatcatcttccctttctactttaccttctcatttcttgaagtctctattctcattaatttgttatttagttacagtcctcttttcagtttcttcagatggggatatgcagatgatagattcttggaatcctttctgcatccctttcactctggcaggtgaatgatgcttggctggaaagagacttcttggttactttccttttctcttaacaggtatagatatgattccactgtctgataccagtccaattcttttcccattgcaaataacttctttctgtctggaatcttatatatttttctc

SEQ ID NO: 68 - protein, 108 aa, Homo sapiens
MYITRLIVHSSSSLSTLPSHFLKSLFSLICYLVTVLFSVSSDGDMQMIDSWNPFCIPFTLAGELAGKRLLGYFPFLLTGIDMIPLSDTSPILFPLQITSFCLESYIFF

SEQ ID NO: 69 - DNA, 2595 bp, Homo sapiens
aatgcaagaatgaactccttcctggaataccccatacttagcagtggcgactcggggacctgctcagcccgagcctacccctcggaccataggattacaactttccagtcgtgcgcggtcagcgccaacagttgcggcggcgacgaccgcttcctagtgggcaggggggtgcagatcggttcgccccaccaccaccaccaccaccaccatcaccacccccagccggctacctaccagacttccgggaacctgggggtgtcctactcccactcaagttgtggtccaagctatggctcacagaacttcagtgcgccttacagcccctacgcgttaaatcaggaagcagacgtaagtggtgggtacccccagtgcgctcccgctgtttactctggaaatctctcatctcccatggtccagcatcaccaccaccaccagggttatgctgggggcgcggtgggctcgcctcaatacattcaccactcatatggacaggagcaccagagcctggccctggctacgtataataactccttgtcccctctccacgccagccaccaagaagcctgtcgctcccccgcatcggagacatcttctccagcgcagacttttgactggatgaaagtcaaaagaaaccctcccaaaacaggtcagtcctgctggttggtggatgctccttgattattctggaaggagctggtatgcttaatttccaaggaaattaataatgatcttttttttaaaaggcttttgtatcagactagtgttgtagtgcatggagagggtgcccagaggtgttggggcaaagaagtctcagggattggtgtgttttcaaggattttatacatttgggaaataggaagtatgtgggggtggttattgtgacggtagtgttctgttaatatcttgaggctccattaatcaccggtctgaccatgctaatggtttacatcaggttaacactttacacctcatcactcaccctccacagcccgatttgtgctgagttcttgatcttttctttacctgagtgttgccatgaagcgtgtggggaatctcaagtcgatttaaaaatttttacatttccgtctcatggcttcccactttgccccaggggaaagttggagagtacggctacctgggtcaacccaacgcggtgcgcaccaacttcactaccaagcagctcacggaactggagaaggagttccacttcaacaagtacctgacgcgcgcccgcagggtggagatcgctgcatccctgcagctcaacgagacccaagtgaagatctggttccagaaccgccgaatgaagcaaaagaaacgtgagaaggagggtctcttgcccatctctccggccaccccgccaggaaacgacgagaaggccgaggaatcctcagagaagtccagctcttcgccctgcgttccttccccggggtcttctacctcagacactctgactacctcccactgaggcggctccagccccagacaacagcccaggcatctccttgggctgggacttcttacccaaagcacatgcttagcttatctttctttccatttacagtctctttcttcctttctaatcctatctggggagctcctggccaggataatatatttgcagataattctggaccagagacttggtgcggggttaacaccttcatccagattgggtgccagcatacattttctggtgggccttaacatccctcctgcttttaggagaattcacagaacctactgttcctttcagatgaccttttggaaaatagttccctttgccaacagaaacatgccagaaggaatgttctcatcttttttatctaactatatgtacagctctcccctcccttgtccttgaaagtaggatatagcgaaaggcgagtccaggagctcaggaagaagagatgcactatatgtttacacaattaattcatcccttaatttaagtcattttcatgtgtgtgagtttgctggttgtaaatactttgtcctaagagatttatctttatacagattttctagaaatgtttaggttactaaaacagggtgggcaaactctctaaactggtacaattttataggtgaaagaaaaaattccctcatttaaacccaatcagatgcctcagagggtagccttgatttgttcttacagttaagaagccctgcagagcacaaacttcagaaacccggcttcctgtgctaagtctttcccaatctctacccctttcttctcgggccaccctctgtttaaaatttgtgctgggttattcagaacctaaaagtattattcaaaccaatttcttccttccacagttatcttagctggatataatgtattttcagctcaattgttaatgtgatggatggcacaatgaatgtatattttgtgttattcgtgaatagtcttttgcatgtcgcacaatgtttgatgtccccaaagtaccacactgagttctatcagttatcctttgtgagcctatgatattccccatttcctgtacaatcatgaacagctctgagatcctggagtgatatgatccagagcagagtttacgggtcttaggatgtctgtaataaataaatatactc

SEQ ID NO: 70 - protein, 330 aa, Homo sapiens
MNSFLEYPILSSGDSGTCSARAYPSDHRITTFQSCAVSANSCGGDDRFLVGRGVQIGSPHHHHHHHHHHPQPATYQTSGNLGVSYSHSSCGPSYGSQNFSAPYSPYALNQEADVSGGYPQCAPAVYSGNLSSPMVQHHHHHQGYAGGAVGSPQYIHHSYGQEHQSLALATYNNSLSPLHASHQEACRSPASETSSPAQTFDWMKVKRNPPKTGKVGEYGYLGQPNAVRTNFTTKQLTELEKEFHFNKYLTRARRVEIAASLQLNETQVKIWFQNRRMKQKKREKEGLLPISPATPPGNDEKAEESSEKSSSSPCVPSPGSSTSDTLTTSH

SEQ ID NO: 71 - protein, 222 aa, Homo sapiens [sequence omitted]

SEQ ID NO: 72 - protein, 132 aa, Homo sapiens
MNSFLEYPILSSGDSGTCSARAYPSDHRITTFQSCAVSANSCGGDDRFLVGRGVQIGSPHHHHHHHHHHPQPATYQTSGNLGVSYSHSSCGPSYGSQNFSAPYSPYALNQEADPPRSLSLPRIGDIFSSADF

SEQ ID NO: 73 - DNA, 368 bp, Homo sapiens
  misc_feature (271)..(271): n = 'unknown'
gaataccagggactcagccagagaagaaagtactgtttttaaataaacagctcctggcagctctttattctagtccacattattcagatatcttcttttttcctctctttctttccatgtgtttgggaaaatttttccaggatgttttcagatgagtttgtgaacaatggccctagagtattctgtttttttccccttgaagcttctgtgacctgaagcatagattacttttatgcattggcttgttgctgagtttattcaatggtgcgangtgttgtttaatgcagtctccacagaacatctccagaacaacctcacagattgaattccaggttcctcacaggaagaggagggaccaggctcctccc

SEQ ID NO: 74 - protein, 52 aa, Homo sapiens
  MISC_FEATURE (20)..(20): X = unknown
LKHRLLLCIGLLLSLFNGAXCCLMQSPQNISRTTSQIEFQVPHRKRRDQAPP

SEQ ID NO: 75 - DNA, 2447 bp, Homo sapiens
tccacgagaaaatcccacagtggaaactcttaagcctctgcgaagtaaatcattcttgtgaatgtgacacacgatctctccagtttccatatgttgagattctacttattcatcagtttgttgtgcttgtcaagatcagacgcagaagaaacatgtccttcattcaccaggctgagctttcacagtgcagtggttggtacgggactaaatgtgaggctgatgctctacacaaggaaaaacctgacctgcgcacaaaccatcaactcctcagcttttgggaacttgaatgtgaccaagaaaaccaccttcattgtccatggattcaggccaacaggctcccctcctgtttggatggatgacttagtaaagggtttgctctctgttgaagacatgaacgtagttgttgttgattggaatcgaggagctacaactttaatatatacccatgcctctagtaagaccagaaaagtagccatggtcttgaaggaatttattgaccagatgttggcagaaggagcttctcttgatgacatttacatgatcggagtaagtctaggagcccacatatctgggtttgttggagagatgtacgatggatggctggggagaattacaggcctcgaccctgcaggccctttattcaacgggaaacctcaccaagacagattagatcccagtgatgcgcagtttgttgatgtcatccattccgacactgatgcactgggctacaaggagccattaggaaacatagacttctacccaaatggaggattggatcaacctggctgccccaaaacaatattgggaggatttcagtattttaaatgtgaccaccagaggtctgtatacctgtacctgtcttccctgagagagagctgcaccatcactgcgtatccctgtgactcctaccaggattataggaatggcaagtgtgtcagctgcggcacgtcacaaaaagagtcctgtccccttctgggctattatgctgataattggaaagaccatctaagggggaaagatcctccaatgacgaaggcattctttgacacagctgaggagagcccattctgcatgtatcattactttgtggatattataacatggaacaagaatgtaagaagaggggacattaccatcaaattgagagacaaagctggaaacaccacagaatccaaaatcaatcatgaacccaccacatttcagaaatatcaccaagtgagtctacttgcaagatttaatcaagatctggataaagtggctgcaatttccttgatgttctctacaggatctctaataggcccaaggtacaagctcaggattctccgaatgaagttaaggtcccttgcccatccggagaggcctcagctgtgtcggtatgatcttgtcctgatggaaaacgttgaaacagtcttccaacctattctttgcccagagttgcagttgtaactgttgccaggacacatggccataaataatagaaagaaagctacaaccacaggctgtttgaaagcttcacctcacctttctgcaaagcagaaaaagtatgaaaaaaccaaggcttttttcagtagcgtcctatggatgtcacattgtacatcaaacaaccttgtgattataaaacgatcctgggaaggagcccctaactagggcaagtcagaaatagccaggctcgcagcagcgcagcgctgtgtctgctgtgtcctggggcctcccttgttccgacctgtcaattctgctgcctgtcacgcgggtggttctgcccatcgcggctgcgggtcaagcatcttcaagggaaggacggactggaggcctcaccgtggactcaactctgcattctccgtgccacattcctccagttcccacacgtagaagggaacgaaactgacgtctacctcatggggctgctgtgtgggtttgggaggcaaaaatctatgaagggttttttgaaatcccataggtgccacatctatgagatgtttgataaatgtgaatatgcttttacatttgggcttatctaatttgcaataagagagcctctctctatcaacaccagcttctctctcgggctgtttgctcagggaaggcaagaaagccacgtgctggccctctgccttctctaaagtgctgttggagcatggaggagctggaggagatggggatggactgacagctaagagggcggctgctgggactagatagtggatgaagaaagaaggacgaggaagccgtggggcagcctcttcacatggggacaggggatggagcatgaggcaggggaaggaaaagcagagcttatttttcacctaaggtggagaaggatcactttacaggcaacgctcattttaagcaacccttaagaaatgtttatgtttctttattaccaatgtaatctatgattattgaaggaaatttagaaaatgcgtagatacaaaaaaaaaaaaaaaaaa

SEQ ID NO: 76 - protein, 451 aa, Homo sapiens
MLRFYLFISLLCLSRSDAEETCPSFTRLSFHSAVVGTGLNVRLMLYTRKNLTCAQTINSSAFGNLNVTKKTTFIVHGFRPTGSPPVWMDDLVKGLLSVEDMNVVVVDWNRGATTLIYTHASSKTRKVAMVLKEFIDQMLAEGASLDDIYMIGVSLGAHISGFVGEMYDGWLGRITGLDPAGPLFNGKPHQDRLDPSDAQFVDVIHSDTDALGYKEPLGNIDFYPNGGLDQPGCPKTILGGFQYFKCDHQRSVYLYLSSLRESCTITAYPCDSYQDYRNGKCVSCGTSQKESCPLLGYYADNWKDHLRGKDPPMTKAFFDTAEESPFCMYHYFVDIITWNKNVRRGDITIKLRDKAGNTTESKINHEPTTFQKYHQVSLLARFNQDLDKVAAISLMFSTGSLIGPRYKLRILRMKLRSLAHPERPQLCRYDLVLMENVETVFQPILCPELQL

SEQ ID NO: 77 - DNA, 2482 bp, Homo sapiens
agagcctggccacccagtggctccaccgccctgatggatccactgaatctgtcctggtatgatgatgatctggagaggcagaactggagccggcccttcaacgggtcagacgggaaggcggacagaccccactacaactactatgccacactgctcaccctgctcatcgctgtcatcgtcttcggcaacgtgctggtgtgcatggctgtgtcccgcgagaaggcgctgcagaccaccaccaactacctgatcgtcagcctcgcagtggccgacctcctcgtcgccacactggtcatgccctgggttgtctacctggaggtggtaggtgagtggaaattcagcaggattcactgtgacatcttcgtcactctggacgtcatgatgtgcacggcgagcatcctgaacttgtgtgccatcagcatcgacaggtacacagctgtggccatgcccatgctgtacaatacgcgctacagctccaagcgccgggtcaccgtcatgatctccatcgtctgggtcctgtccttcaccatctcctgcccactcctcttcggactcaataacgcagaccagaacgagtgcatcattgccaacccggccttcgtggtctactcctccatcgtctccttctacgtgcccttcattgtcaccctgctggtctacatcaagatctacattgtcctccgcagacgccgcaagcgagtcaacaccaaacgcagcagccgagctttcagggcccacctgagggctccactaaagggcaactgtactcaccccgaggacatgaaactctgcaccgttatcatgaagtctaatgggagtttcccagtgaacaggcggagagtggaggctgcccggcgagcccaggagctggagatggagatgctctccagcaccagcccacccgagaggacccggtacagccccatcccacccagccaccaccagctgactctccccgacccgtcccaccatggtctccacagcactcccgacagccccgccaaaccagagaagaatgggcatgccaaagaccaccccaagattgccaagatctttgagatccagaccatgcccaatggcaaaacccggacctccctcaagaccatgagccgtaggaagctctcccagcagaaggagaagaaagccactcagatgctcgccattgttctcggcgtgttcatcatctgctggctgcccttcttcatcacacacatcctgaacatacactgtgactgcaacatcccgcctgtcctgtacagcgccttcacgtggctgggctatgtcaacagcgccgtgaaccccatcatctacaccaccttcaacattgagttccgcaaggccttcctgaagatcctccactgctgactctgctgcctgcccgcacagcagcctgcttcccacctccctgcccaggccggccagcctcacccttgcgaaccgtgagcaggaaggcctgggtggatcggcctcctcttcttagccccggcaggccctgcagtgttcgcttggctccatgctcctcactgcccgcacaccctcactctgccagggcagtgctagtgagctgggcatggtaccagccctggggctggccccagctcaggggcagctcatagagtcccccctcccacctccagtccccctatccttggcaccaaagatgcagccgccttccttgaccttcctctggggctctagggttgctggagcctgagtcagggcccagaggctgagttttctctttgtggggcttggcgtggagcaggcggtggggagagatggacagttcacaccctgcaaggcccacaggaggcaagcaagctctcttgccgaggagccaggcaacttcagtcctgggagacccatgtaaataccagactgcaggttggacccgagagattcccaagccaaaaaccttagctccctcccgcaccccgatgtggacctctactttccaggctagtccggacccacctcaccccgttacagctccccaagtggtttccacatgctctgagaagaggagccctcatcttgaagggcccaggagggtctatggggagaggaactccttggcctagcccaccctgctgccttctgacggccctgcaatgtatcccttctcacagcacatgctggccagcctggggcctggcagggaggtcaggccctggaactctatctgggcctgggctagggacatcagaggttctttgagggactgcctctgccacactctgacgcaaaaccactttccttttctattccttctggcctttcctctctcctgtttcccttcccttccactgcctctgccttagaggagcccacggctaagaggctgctgaaaaccatctggcctggcctggccctgccctgaggaaggaggggaagctgcagcttgggagagcccctggggcctagactctgtaacatcactatccgatgcaccaaactaataaaactttgacgagtcaccttc

SEQ ID NO: 78 - protein, 443 aa, Homo sapiens
MDPLNLSWYDDDLERQNWSRPFNGSDGKADRPHYNYYATLLTLLIAVIVFGNVLVCMAVSREKALQTTTNYLIVSLAVADLLVATLVMPWVVYLEVVGEWKFSRIHCDIFVTLDVMMCTASILNLCAISIDRYTAVAMPMLYNTRYSSKRRVTVMISIVWVLSFTISCPLLFGLNNADQNECIIANPAFVVYSSIVSFYVPFIVTLLVYIKIYIVLRRRRKRVNTKRSSRAFRAHLRAPLKGNCTHPEDMKLCTVIMKSNGSFPVNRRRVEAARRAQELEMEMLSSTSPPERTRYSPIPPSHHQLTLPDPSHHGLHSTPDSPAKPEKNGHAKDHPKIAKIFEIQTMPNGKTRTSLKTMSRRKLSQQKEKKATQMLAIVLGVFIICWLPFFITHILNIHCDCNIPPVLYSAFTWLGYVNSAVNPIIYTTFNIEFRKAFLKILHC

SEQ ID NO: 79 - DNA, 659 bp, Homo sapiens
tgcagggggggggaaaagttgggagtgacaccagagccttctgcaagatgcttctgattctgctgtcagtggccctgctggccttcagctcagctcaggacttagatgaagatgtcagccaagaagacgttcccttggtaatatcagatggaggagactctgagcagttcatagatgaggagcgtcagggaccacctttgggaggacagcaatctcaaccctctgctggtgatgggaaccagaatgatggccctcagcagggaccaccccaacaaggaggccagcagcaacaaggtccaccacctcctcagggaaagccacaaggaccaccccaacagggaggccatccccctcctcctcaaggaaggccacaaggaccaccccaacagggaggccatccccgtcctcctcgaggaaggccacaaggaccaccccaacagggaggccatcagcaaggtcctcccccacctcctcctggaaagccccagggaccacctccccaagggggccgcccacaaggacctccacaggggcagtctcctcagtaatctaggattcaatgacaggaagtgaataagaagatgacagtgtttcaaatgccttgaaacataatgtgatcatgctctaacttcaatataccaataaaataatcagcttgc

SEQ ID NO: 80 - protein, 166 aa, Homo sapiens
MLLILLSVALLAFSSAQDLDEDVSQEDVPLVISDGGDSEQFIDEERQGPPLGGQQSQPSAGDGNQNDGPQQGPPQQGGQQQQGPPPPQGKPQGPPQQGGHPPPPQGRPQGPPQQGGHPRPPRGRPQGPPQQGGHQQGPPPPPPGKPQGPPPQGGRPQGPPQGQSPQ

SEQ ID NO: 81 - DNA, 574 bp, Homo sapiens
aggttctgagagctgtgttgtctgcgtgcacatgggtgagccggaaaggagacctgcagagaatgaaacagacacataaaggaaagcctcccagcagcatggctttcaccggcaagttcgagatggagagtgagaagaattatgatgagttcatgaagctccttgggatctccagcgatgtaatcgaaaaggcccacaacttcaagatcgtcacggaggtgcagcaggatgggcaggacttcacttggtcccagcactactacgggggccacaccatgaccaacaagttcactgttggcaaggaaagcaacatacagacaatggggggcaagacgttcaaggccactgtgcagatggagggcgggaagctggtggtgaatttccccaactatcaccagacctcagagatcgtgggtgacaagctggtggaggtctccaccatcggaggcgtgacctatgagcgcgtgagcaagagactggcctaagcagccaggcccggcccagggagctacaaacccaccaataaaactgatataaggacagacgctaaaaaaaaagaaaaaaaaaaaaaaaa

SEQ ID NO: 82 - protein, 128 aa, Homo sapiens
MAFTGKFEMESEKNYDEFMKLLGISSDVIEKAHNFKIVTEVQQDGQDFTWSQHYYGGHTMTNKFTVGKESNIQTMGGKTFKATVQMEGGKLVVNFPNYHQTSEIVGDKLVEVSTIGGVTYERVSKRLA

SEQ ID NO: 83 - DNA, 1942 bp, Homo sapiens
ggcacgagggacttcctcccagcacattcctgcactctgccgtgtccacactgccccacagacccagtcctccaagcctgctgccagctccctgcaagcccctcaggttgggccttgccacggtgccagcaggcagccctgggctgggggtaggggactccctacaggcacgcagccctgagacctcagagggccaccccttgagggtggccaggcccccagtggccaacctgagtgctgcctctgccaccagccctgctggcccctggttccgctggccccccagatgcctggctgagacacgccagtggcctcagctgcccacacctcttcccggcccctgaagttggcactgcagcagacagctccctgggcaccaggcagctaacagacacagccgccagcccaaacagcagcggcatgggcagcgccagcccgggtctgagcagcgtatcccccagccacctcctgctgccccccgacacggtgtcgcggacaggcttggagaaggcggcagcgggggcagtgggtctcgagagacgggactggagtcccagtccacccgccacgcccgagcagggcctgtccgccttctacctctcctactttgacatgctgtaccctgaggacagcagctgggcagccaaggcccctggggccagcagtcgggaggagccacctgaggagcctgagcagtgcccggtcattgacagccaagccccagcgggcagcctggacttggtgcccggcgggctgaccttggaggagcactcgctggagcaggtgcagtccatggtggtgggcgaagtgctcaaggacatcgagacggcctgcaagctgctcaacatcaccgcagatcccatggactggagccccagcaatgtgcagaagtggctcctgtggacagagcaccaataccggctgccccccatgggcaaggccttccaggagctggcgggcaaggagctgtgcgccatgtcggaggagcagttccgccagcgctcgcccctgggtggggatgtgctgcacgcccacctggacatctggaagtcagcggcctggatgaaagagcggacttcacctggggcgattcactactgtgcctcgaccagtgaggagagctggaccgacagcgaggtggactcatcatgctccgggcagcccatccacctgtggcagttcctcaaggagttgctactcaagccccacagctatggccgcttcattaggtggctcaacaaggagaagggcatcttcaaaattgaggactcagcccaggtggcccggctgtggggcatccgcaagaaccgtcccgccatgaactacgacaagctgagccgctccatccgccagtattacaagaagggcatcatccggaagccagacatctcccagcgcctcgtctaccagttcgtgcaccccatctgagtgcctggcccagggcctgaaacccgccctcaggggcctctctcctgcctgccctgcctcagccaggccctgagatgggggaaaacgggcagtctgctctgctgctctgaccttccagagcccaaggtcagggaggggcaaccaactgccccagggggatatgggtcctctggggccttcgggaccctggggcaggggtgcttcctcctcaggcccagctgctcccctggaggacagagggagacagggctgctccccaacacctgcctctgaccccagcatttccagagcagagcctacagaagggcagtgactcgacaaaggccacaggcagtccaggcctctctctgctccatccccctgcctcccattctgcaccacacctggcatggtgcagggagacatctgcacccctgagttgggcagccaggagtgcccccgggaatggataataaagatactagagaactgaaaaaaaaaaaaaaaaaaaaaaaacaaaaaaaaaaaaaaaaaa

SEQ ID NO: 84 - protein, 335 aa, Homo sapiens
MGSASPGLSSVSPSHLLLPPDTVSRTGLEKAAAGAVGLERRDWSPSPPATPEQGLSAFYLSYFDMLYPEDSSWAAKAPGASSREEPPEEPEQCPVIDSQAPAGSLDLVPGGLTLEEHSLEQVQSMVVGEVLKDIETACKLLNITADPMDWSPSNVQKWLLWTEHQYRLPPMGKAFQELAGKELCAMSEEQFRQRSPLGGDVLHAHLDIWKSAAWMKERTSPGAIHYCASTSEESWTDSEVDSSCSGQPIHLWQFLKELLLKPHSYGRFIRWLNKEKGIFKIEDSAQVARLWGIRKNRPAMNYDKLSRSIRQYYKKGIIRKPDISQRLVYQFVHPI

SEQ ID NO: 85 - DNA, 1224 bp, Homo sapiens
ggagctctccccggtctgacagccactccagaggccatgcttcgtttcttgccagatttggctttcagcttcctgttaattctggctttgggccaggcagtccaatttcaagaatatgtctttctccaatttctgggcttagataaggcgccttcaccccagaagttccaacctgtgccttatatcttgaagaaaattttccaggatcgcgaggcagcagcgaccactggggtctcccgagacttatgctacgtaaaggagctgggcgtccgcgggaatgtacttcgctttctcccagaccaaggtttctttctttacccaaagaaaatttcccaagcttcctcctgcctgcagaagctcctctactttaacctgtctgccatcaaagaaagggaacagttgacattggcccagctgggcctggacttggggcccaattcttactataacctgggaccagagctggaactggctctgttcctggttcaggagcctcatgtgtggggccagaccacccctaagccaggtaaaatgtttgtgttgcggtcagtcccatggccacaaggtgctgttcacttcaacctgctggatgtagctaaggattggaatgacaacccccggaaaaatttcgggttattcctggagatactggtcaaagaagatagagactcaggggtgaattttcagcctgaagacacctgtgccagactaagatgctcccttcatgcttccctgctggtggtgactctcaaccctgatcagtgccacccttctcggaaaaggagagcagccatccctgtccccaagctttcttgtaagaacctctgccaccgtcaccagctattcattaacttccgggacctgggttggcacaagtggatcattgcccccaaggggttcatggcaaattactgccatggagagtgtcccttctcactgaccatctctctcaacagctccaattatgctttcatgcaagccctgatgcatgccgttgacccagagatcccccaggctgtgtgtatccccaccaagctgtctcccatttccatgctctaccaggacaataatgacaatgtcattctacgacattatgaagacatggtagtcgatgaatgtgggtgtgggtaggatgtcagaaatgggaatagaaggagtgttcttagggtaaatcttttaataaaactacctatctggtttatgaccacttagatcgaaatgtca

SEQ ID NO: 86 - protein, 364 aa, Homo sapiens
MLRFLPDLAFSFLLILALGQAVQFQEYVFLQFLGLDKAPSPQKFQPVPYILKKIFQDREAAATTGVSRDLCYVKELGVRGNVLRFLPDQGFFLYPKKISQASSCLQKLLYFNLSAIKEREQLTLAQLGLDLGPNSYYNLGPELELALFLVQEPHVWGQTTPKPGKMFVLRSVPWPQGAVHFNLLDVAKDWNDNPRKNFGLFLEILVKEDRDSGVNFQPEDTCARLRCSLHASLLVVTLNPDQCHPSRKRRAAIPVPKLSCKNLCHRHQLFINFRDLGWHKWIIAPKGFMANYCHGECPFSLTISLNSSNYAFMQALMHAVDPEIPQAVCIPTKLSPISMLYQDNNDNVILRHYEDMVVDECGCG

SEQ ID NO: 87 - DNA, 993 bp, Homo sapiens
ggcacgaggggcagaggctccggagccatgcaggccgaaggccggggcacagggggttcgacgggcgatgctgatggcccaggaggccctggcattcctgatggcccagggggcaatgctggcggcccaggagaggcgggtgccacgggcggcagaggtccccggggcgcaggggcagcaagggcctcggggccgagaggaggcgccccgcggggtccgcatggcggtgccgcttctgcgcaggatggaaggtgcccctgcggggccaggaggccggacagccgcctgcttgagttgcacatcacgatgcctttctcgtcgcccatggaagcggagctggtccgcaggatcctgtcccgggatgccgcaccgctcccccgaccaggggcggttctgaaggacttcaccgtgtccggcaacctactgtttatgtcagttcgggaccaggacagggaaggcgctgggcggatgagggtggtgggttgggggctgggatccgcctccccggaggggcagaaagctagagatctcagaacacccaaacacaaggtctcagaacagagacctggtacaccaggcccgccgccacccgagggagcccagggagatgggtgcagaggtgtcgcctttaatgtgatgttctctgcccctcacatttagccgactgactgctgcagaccaccgccaactgcagctctccatcagctcctgtctccagcagctttccctgttgatgtggatcacgcagtgctttctgcccgtgtttttggctcaggctccctcagggcagaggcgctaagcccagcctggcgccccttcctaggtcatgcctcctcccctagggaatggtcccagcacgagtggccagttcattgtgggggcctgattgtttgtcgctggaggaggacggcttacatgtttgtttctgtagaaaataaagctgagctacgaaaaaaaaaaaaaaaaaaaaaaaaaaaaaaaaaaaaaaaaaaa

SEQ ID NO: 88 - protein, 210 aa, Homo sapiens
MQAEGRGTGGSTGDADGPGGPGIPDGPGGNAGGPGEAGATGGRGPRGAGAARASGPRGGAPRGPHGGAASAQDGRCPCGARRPDSRLLELHITMPFSSPMEAELVRRILSRDAAPLPRPGAVLKDFTVSGNLLFMSVRDQDREGAGRMRVVGWGLGSASPEGQKARDLRTPKHKVSEQRPGTPGPPPPEGAQGDGCRGVAFNVMFSAPHI

SEQ ID NO: 89 - DNA, 236 bp, Homo sapiens
ccaggaagtactggccacttcttcaaccctctttagcagaggtgaggggcagtgcccatccagagtctggcaccaacgggccttgccaagtagctgctgagtgaatgggcacatgacgccaccctcagaaaggaaagcaagatccggcgcaccccctcagggcgagcaaaaccccatgggatccgcagaggaagcaggcctagaatgccccccacccacccccagacaagcctgac

SEQ ID NO: 90 - protein, 47 aa, Homo sapiens [sequence omitted]

SEQ ID NO: 91 - DNA, 1584 bp, Homo sapiens
cccactcccgaccgtccggtccggcccacccggccaccagccatggctctggccgtctcgctgcccctggcctgtcgcgcgcggctgctgctgctgctgctgtctctgctgccagtggccagggcctcagaggctgagcaccgtctatttgagcggctgtttgaagattacaatgagatcatccggcctgtagccaacgtgtctgacccagtcatcatccatttcgaggtgtccatgtctcagctggtgaaggtggatgaagtaaaccagatcatggagaccaacctgtggctcaagcaaatctggaatgactacaagctgaagtggaacccctctggctatggtggggcagagttcatgcgtgtccctgcacagaagatctggaagccagacattgtgctgtataacaatgctgttggggatttccaggtgacgaccaagaccaaagccttactcaagtacactggggaggtgacttggatacctccggccatctttaagagctcctgtaaaatcgacgtgacctacttcccgtttgattaccaaaactgtaccatgaagttcggttcctggtcctacgataaggcgaaaatcgatctggtcctgatcggctcttccatgaacctcaaggactattgggagagcggcgagtgggccatcatcaaagccccaggctacaaacacgacatcaagtacaactgctgcgaggagatctaccccgacatcacatactcgctgtacagtcggcgcctgcccttgttctacaccatcaacctcatcatcccctgcctgctcatctccttcctcactgtgctcgtcttctacctgccctccgactgcggtgagaaggtgaccctgtgcatttctgtcctcctctccctgacggtgtttctcctggtgatcactgagaccatcccttccacctcgctggtcatccccctgattggagagtacctcctgttcaccatgatttttgtaaccttgtccatcgtcatcaccgtcttcgtgctcaacgtgcactacagaaccccgacgacacacacaatgccctcatgggtgaagactgtattcttgaacctgctccccagggtcatgttcatgaccaggccaacaagcaacgagggcaacgctcagaagccgaggcccctctacggtgccgagctctcaaatctgaattgcttcagccgcgcagagtccaaaggctgcaaggagggctacccctgccaggacgggatgtgtggttactgccaccaccgcaggataaaaatctccaatttcagtgctaacctcacgagaagctctagttctgaatctgttgatgctgtggtgtccctctctgctttgtcaccagaaatcaaagaagccatccaaagtgtcaagtatattgctgaaaatatgaaagcacaaaatgaagccaaagagattcaagatgattggaagtatgttgccatggtgattgatcgtatttttctgtgggttttcaccctggtgtgcattctagggacagcaggattgtttctgcaacccctgatggccagggaagatgcataagcactaagctgtgtgcctgcctgggaagacttc

SEQ ID NO: 92 - protein, 502 aa, Homo sapiens [sequence omitted]

SEQ ID NO: 93 - DNA, 515 bp, Homo sapiens
tttttttaaaacttttaaagaagttgtttattgccaataattaaagagctcaaagggaagtcatttaaccatgagattgccaaatagaactctacaacagctgattcaacctttttaaaattttccctggggagagacttcactactatctctgctgatggactccatagttctcatactttacctgaaagttcttcctaacatctgatctcaacctttcttgccggggcattggcctgttttcccagccaagccttgtttttgtttttgaggaacgaacagcttttttgggtacagaccaggagtccatgggtcttgaggacctctgtgtatttatcagttttcttctccacattctttttggcctgtctccatagacttgtgagccccatgccttgtttaagggggaaaaatggcatttccctacaaattaaatgtaagaatccatagagaactggaccccattaaaaatatttggaattcacatggccacttgatcatattccgctggctca

SEQ ID NO: 94 - protein, 34 aa, Homo sapiens
MAFPYKLNVRIHRELDPIKNIWNSHGHLIIFRWL

SEQ ID NO: 95 - DNA, 490 bp, Homo sapiens
  misc_feature (439)..(439): n = unknown
ataatatttattttaaatagtggagatagggtctcactctgttgtccacgctggtcttgcctcaagtagtcctcctgcctcagcctcccagagtgctgggattacagatgtcaaccacttcacccagcctgtgctgtctttattgaaaatagcaagcgatgattttccaaaccagaaggccaagcaggaaagcccagcgcgtcccttgccctcaaactcagctcttggggaggtgtccagtgacgtcctctctgctgtacaggatgatcccaccccgatcgttaggaagatgtgccccaggaactcgggatttccttagtgtggtgattaggggtgaaatggatcctttgatagggagtttcttgatggaacgaagggcgagagtgtctctgagaagtgctgcagaccaaggagggccagcctgtcctggagcacctgnggctgttcttggagtaaggctgaagggccagacactgatggcttatggtgg

SEQ ID NO: 96 - protein, 110 aa, Homo sapiens
  MISC_FEATURE (94)..(94): X = unknown
MIFQTRRPSRKAQRVPCPQTQLLGRCPVTSSLLYRMIPPRSLGRCAPGTRDFLSVVIRGEMDPLIGSFLMERRARVSLRSAADQGGPACPGAPXAVLGVRLKGQTLMAYG

SEQ ID NO: 97 - DNA, 3174 bp, Homo sapiens
ggctcaccgacaacttcatcgccgccgtgcgccgccgagacttcgccaacatgaccagcctggtgcacctcactctctcccggaacaccatcggccaggtggcagctggcgccttcgccgacctgcgtgccctccgggccctgcacctggacagcaaccgcctggcggaggtgcgcggcgaccagctccgcggcctgggcaacctccgccacctgatccttggaaacaaccagatccgccgggtggagtcggcggcctttgacgccttcctgtccaccgtggaggacctggatctgtcctacaacaacctggaggccctgccgtgggaggcggtgggccagatggtgaacctaaacaccctcacgctggaccacaacctcatcgaccacatcgcggaggggaccttcgtgcagcttcacaagctggtccgtctggacatgacctccaaccgcctgcataaactcccgcccgacgggctcttcctgaggtcgcagggcaccgggcccaagccgcccaccccgctgaccgtcagcttcggcggcaaccccctgcactgcaactgcgagctgctctggctgcggcggctgacccgcgaggacgacttagagacctgcgccacgcccgaacacctcaccgaccgctacttctggtccatccccgaggaggagttcctgtgtgagcccccgctgatcacacggcaggcggggggccgggccctggtggtggaaggccaggcggtgagcctgcgctgccgagcggtgggtgaccccgagccggtggtgcactgggtggcacctgatgggcggctgctggggaactccagccggacccgggtccggggggacgggacgctggatgtgaccatcaccaccttgagggacagtggcaccttcacttgtatcgcctccaatgctgctggggaagcgacggcgcccgtggaggtgtgcgtggtacctctgcctctgatggcacccccgccggctgccccgccgcctctcaccgagcccggctcctctgacatcgccacgccgggcagaccaggtgccaacgattctgcggctgagcgtcggctcgtggcagccgagctcacctcgaactccgtgctcatccgctggccagcccagaggcctgtgcccggaatacgcatgtaccaggttcagtacaacagttccgttgatgactccctcgtctacaggatgatcccgtccaccagtcagaccttcctggtgaatgacctggcggcgggccgtgcctacgacttgtgcgtgctggcggtctacgacgacggggccacagcgctgccggcaacgcgagtggtgggctgtgtacagttcaccaccgctggggatccggcgccctgccgcccgctgagggcccatttcttgggcggcaccatgatcatcgccatcgggggcgtcatcgtcgcctcggtcctcgtcttcatcgttctgctcatgatccgctataaggtgtatggcgacggggacagccgccgcgtcaagggctccaggtcgctcccgcgggtcagccacgtgtgctcgcagaccaacggcgcaggcacaggcgcggcacaggccccggccctgccggcccaggaccactacgaggcgctgcgcgaggtggagtcccaggctgcccccgccgtcgccgtcgaggccaaggccatggaggccgagacggcatccgcggagccggaggtggtccttggacgttctctgggcggctcggccacctcgctgtgcctgctgccatccgaggaaacttccggggaggagtctcgggccgcggtgggccctcgaaggagccgatccggcgccctggagccaccaacctcggcgccccctactctagctctagttcctgggggagccgcggcccggccgaggccgcagcagcgctattcgttcgacggggactacggggcactattccagagccacagttacccgcgccgcgcccggcggacaaagcgccaccggtccacgccgcacctggacggggctggagggggcgcggccggggaggatggagacctggggctgggctccgccagggcgtgcctggctttcaccagcaccgagtggatgctggagagtaccgtgtgagcggcgggcgggcgccgggacgcctgggtgccgcagaccaaacgcccagccgcacggacgctggggcgggactgggagaaagcgcagcgccaagacattggaccagagtggagacgcgcccttgtccccgggagggggcggggcagcctcgggctgcggctcgaggccacgcccccgtgcccagggcggggttcggggaccggctgccggcctcccttcccctatggactcctcgacccccctcctacccctcccctcgcgcgctcgcggacctcgctggagccggtgccttacacagcgaagcgcggggaggggcagggccccctgacactgcagcactgagacacgagccccctcccccagcccgtcacccggggccggggcgaggggcccatttcttgtatctggctggactagatcctattctgtcccgcggcggcctccaaagcctcccaccccaccccacgcacattcctggtccggtcgggtctggcttggggtccccctttctctgtttccctcgtttgtctctatcccgccctcttgtcgtctctctgtagtgcctgtctttccctatttgcctctcctttctctctgtcctgtcgtctcttgtccctcggccctccctggttttgtctagtctccctgtctctcctgatttcttctctttactcattctcccgggcaggtcccactggaaggaccagactctcccaaataaatccccacacgaacaaaatccaaaaccaaatccccctccctaccggagccgggaccctccgccgcagcagaattaaacttttttctgtgtctgaggccctgctgacctgtgtgtgtgtctgtatgtgtgtccgcgtgtagtgtgtgtgtgtgtgtgtgtgtgtgtgtgtgtgtgtgtgtgtgtgttgggggagggtgacctagattgcagcataaggactctaagtgagactgaaggaagatgggaagatgactaactggggccggaggagactggcagacaggcttttatcctctgagagacttagaggtggggaataatcacaaaaataaaatgatcataatagct

SEQ ID NO: 98 - protein, 700 aa, Homo sapiens
LTDNFIAAVRRRDFANMTSLVHLTLSRNTIGQVAAGAFADLRALRALHLDSNRLAEVRGDQLRGLGNLRHLILGNNQIRRVESAAFDAFLSTVEDLDLSYNNLEALPWEAVGQMVNLNTLTLDHNLIDHIAEGTFVQLHKLVRLDMTSNRLHKLPPDGLFLRSQGTGPKPPTPLTVSFGGNPLHCNCELLWLRRLTREDDLETCATPEHLTDRYFWSIPEEEFLCEPPLITRQAGGRALVVEGQAVSLRCRAVGDPEPVVHWVAPDGRLLGNSSRTRVRGDGTLDVTITTLRDSGTFTCIASNAAGEATAPVEVCVVPLPLMAPPPAAPPPLTEPGSSDIATPGRPGANDSAAERRLVAAELTSNSVLIRWPAQRPVPGIRMYQVQYNSSVDDSLVYRMIPSTSQTFLVNDLAAGRAYDLCVLAVYDDGATALPATRVVGCVQFTTAGDPAPCRPLRAHFLGGTMIIAIGGVIVASVLVFIVLLMIRYKVYGDGDSRRVKGSRSLPRVSHVCSQTNGAGTGAAQAPALPAQDHYEALREVESQAAPAVAVEAKAMEAETASAEPEVVLGRSLGGSATSLCLLPSEETSGEESRAAVGPRRSRSGALEPPTSAPPTLALVPGGAAARPRPQQRYSFDGDYGALFQSHSYPRRARRTKRHRSTPHLDGAGGGAAGEDGDLGLGSARACLAFTSTEWMLESTV

SEQ ID NO: 99 - DNA, 697 bp, Homo sapiens
gaggccgtgaacaaggccctggagctgtccctgcagctcaaccgcgtctcgctggagcgagactccctgtctcgggagctgctgcgcgccatccgccagaaggtggcgctcacgcaggagctggaggcctggcaggacgacatgcaggtggtgatcgggcagcagctgcgctcacagcgccagaaggagctgagcgcctccgcgtcgtcgtcgaccccgcgccgtgccgcgccccgcttctcgccgcgcctgggccccgggcccgccggtggctttctcagtaacctcttccgaaggacctgacggctgggcccagagggctgcccttgcccacttaggggctcactttcctcttcaggccaatggagcgacagggcccagattgtcttccaaaagaagctgatgccctccccgccccaggatgctgggcaagggctcatcgggagcaggggctcatccggagcaggggccagctttgtggggcaggagctccaggtgggtggcaggggcaggtgaacagagctattttccgaattaatataggtctatcttttctagggcagggatggggctgggtatttatgtatcaagatcggacagagtaatatataaatcactccaccgatttggcccccattcatagaaagaaagagcatggtaaaaaagcctgaaactttattgtaaaaaaaaaaaaaaa

SEQ ID NO: 100 - protein, 100 aa, Homo sapiens
EAVNKALELSLQLNRVSLERDSLSRELLRAIRQKVALTQELEAWQDDMQVVIGQQLRSQRQKELSASASSSTPRRAAPRFSPRLGPGPAGGFLSNLFRRT

SEQ ID NO: 101 - DNA, 302 bp, Homo sapiens
ttttttttaaagcttttctcattttctttattgtggttgaatccaatttaaattaaaatatgaaatgcttaacaatcataaaatcagtatttgctgtggtaaacaaaagagatctacactagtatttacaactctttaatttgtttaaaaaggaggcaatataaccattttaacacatttaaaccttttgcctctagaagatatatcaattaacacacaatattcaaggaaatcagtgctgtatagatatttttggtctattaaggtgcaatttataatacagaaccaacacaatactgaag

SEQ ID NO: 102 - protein, 38 aa, Homo sapiens
LPLEDISINTQYSRKSVLYRYFWSIKVQFIIQNQHNTE

SEQ ID NO: 103 - DNA, 1628 bp, Homo sapiens
acttgcgacaaggtggacttgggaggaaagccgtctgccaaagcctgaagcctccaagccataaacaaccccaatggcctcccacgaagttgataatgcagagctggggtcagcctctgcccatggtaccccaggcagtgaggcgggaccagaagagctgaatacttctgtctaccagcccatagatggatcaccagattatcagaaagcaaaattacaagttcttggggccatccagatcctgaatgcagcaatgattctggctttgggtgtctttctgggttccttgcaatacccataccacttccaaaagcacttctttttcttcaccttctacacaggctacccgatttggggtgctgtgtttttctgtagttcaggaaccttgtctgttgtagcagggataaaacccacaagaacatggatacagaacagttttggaatgaacattgccagtgctacaattgcactagtggggactgcttttctctcactaaatatagcagttaatatccagtcattaaggagttgtcactcttcatcagagtcaccggacctatgcaattacatgggctccatatcaaatggcatggtgtctctactgctgattctcaccttgctggaattatgcgtaaccatctctaccatagccatgtggtgcaatgcaaactgctgtaattcaagagaggaaatttcctcacctcccaattctgtgtaatcaagaatacctccttaattctgagagcatgaatatttgaccttaaatctccagtgactcagagcttcacccacaaactcaggagaacataagcctgctcgtaaagctcaatccttctatcatggcaccaatcacaagaaccttggacgtttgactgactctatcctttctctcctaactataaatcctatttgtgtgtcgtgggtatggaaggacagatatatttctttaggcattcttggatatctgtaacttctatgatcattactccaaagttgtttccagaaattggttctatttcttcttatccacctactccattgctttatgaggtttaaggaaggaaggcggtataatccctattcaatatattttttctaaaatccaacttctgaccgcccagtaggaagaaaaatgagacattttttccattacagagaaatgcttcttgactttaacatcagcattataaaaagtgtcaaataaaaaattaccatcattatcattaaaataaattttcactgtatttgagatgggagggttaaggctcagggattttatttcagtgaactgctggaactcacacatgccctgatatgtaaatgatgatttatgttggcgagtctgagagcaagcccaaatgtgttcttcaaaggacaatgggaaactgtaaagtagagaactaaagaataaggcctttagaatctgacacatctgggttcaaattctgaaactgtcacttattacctgtatgaacatgggcaaattatctaatctctctgatctatttttcctcatctgtaaaataggtgtaataataacaactactttgtcggttgctctgagggttaaatgaaaataaaaagaaaatgtgaaacaacaaaaaaaaaaaaaaaaaaaaaaaaaaaaa

SEQ ID NO: 104 - protein, 214 aa, Homo sapiens
MASHEVDNAELGSASAHGTPGSEAGPEELNTSVYQPIDGSPDYQKAKLQVLGAIQILNAAMILALGVFLGSLQYPYHFQKHFFFFTFYTGYPIWGAVFFCSSGTLSVVAGIKPTRTWIQNSFGMNIASATIALVGTAFLSLNIAVNIQSLRSCHSSSESPDLCNYMGSISNGMVSLLLILTLLELCVTISTIAMWCNANCCNSREEISSPPNSV

SEQ ID NO: 105 - DNA, 2011 bp, Homo sapiens
tttcagtttctccagctgctggctttttggacacccactcccccgccaggaggcagttgcaagcgcggaggctgcgagaaataactgcctcttgaaacttgcagggcgaagagcaggcggcgagcgctgggccggggagggaccacccgagctgcgacgggctctggggctgcggggcagggctggcgcccggagcctgagctgcaggaggtgcgctcgctttcctcaacaggtggcggcggggcgcgcgccgggagaccccccctaatgcgggaaaagcacgtgtccgcattttagagaaggcaaggccggtgtgtttatctgcaagccattatacttgcccacgaatctttgagaacattataatgacctttgtgcctcttcttgcaaggtgttttctcagctgttatctcaagacatggatataaaaaactcaccatctagccttaattctccttcctcctacaactgcagtcaatccatcttacccctggagcacggctccatatacataccttcctcctatgtagacagccaccatgaatatccagccatgacattctatagccctgctgtgatgaattacagcattcccagcaatgtcactaacttggaaggtgggcctggtcggcagaccacaagcccaaatgtgttgtggccaacacctgggcacctttctcctttagtggtccatcgccagttatcacatctgtatgcggaacctcaaaagagtccctggtgtgaagcaagatcgctagaacacaccttacctgtaaacagagagacactgaaaaggaaggttagtgggaaccgttgcgccagccctgttactggtccaggttcaaagagggatgctcacttctgcgctgtctgcagcgattacgcatcgggatatcactatggagtctggtcgtgtgaaggatgtaaggccttttttaaaagaagcattcaaggacataatgattatatttgtccagctacaaatcagtgtacaatcgataaaaaccggcgcaagagctgccaggcctgccgacttcggaagtgttacgaagtgggaatggtgaagtgtggctcccggagagagagatgtgggtaccgccttgtgcggagacagagaagtgccgacgagcagctgcactgtgccggcaaggccaagagaagtggcggccacgcgccccgagtgcgggagctgctgctggacgccctgagccccgagcagctagtgctcaccctcctggaggctgagccgccccatgtgctgatcagccgccccagtgcgcccttcaccgaggcctccatgatgatgtccctgaccaagttggccgacaaggagttggtacacatgatcagctgggccaagaagattcccggctttgtggagctcagcctgttcgaccaagtgcggctcttggagagctgttggatggaggtgttaatgatggggctgatgtggcgctcaattgaccaccccggcaagctcatctttgctccagatcttgttctggacagggatgaggggaaatgcgtagaaggaattctggaaatctttgacatgctcctggcaactacttcaaggtttcgagagttaaaactccaacacaaagaatatctctgtgtcaaggccatgatcctgctcaattccagtatgtaccctctggtcacagcgacccaggatgctgacagcagccggaagctggctcacttgctgaacgccgtgaccgatgctttggtttgggtgattgccaagagcggcatctcctcccagcagcaatccatgcgcctggctaacctcctgatgctcctgtcccacgtcaggcatgcgagtaacaagggcatggaacatctgctcaacatgaagtgcaaaaatgtggtcccagtgtatgacctgctgctggagatgctgaatgcccacgtgcttcgcgggtgcaagtcctccatcacggggtccgagtgcagcccggcagaggacagtaaaagcaaagagggctcccagaacccacagtctcagtga

SEQ ID NO: 106 - protein, 530 aa, Homo sapiens
MDIKNSPSSLNSPSSYNCSQSILPLEHGSIYIPSSYVDSHHEYPAMTFYSPAVMNYSIPSNVTNLEGGPGRQTTSPNVLWPTPGHLSPLVVHRQLSHLYAEPQKSPWCEARSLEHTLPVNRETLKRKVSGNRCASPVTGPGSKRDAHFCAVCSDYASGYHYGVWSCEGCKAFFKRSIQGHNDYICPATNQCTIDKNRRKSCQACRLRKCYEVGMVKCGSRRERCGYRLVRRQRSADEQLHCAGKAKRSGGHAPRVRELLLDALSPEQLVLTLLEAEPPHVLISRPSAPFTEASMMMSLTKLADKELVHMISWAKKIPGFVELSLFDQVRLLESCWMEVLMMGLMWRSIDHPGKLIFAPDLVLDRDEGKCVEGILEIFDMLLATTSRFRELKLQHKEYLCVKAMILLNSSMYPLVTATQDADSSRKLAHLLNAVTDALVWVIAKSGISSQQQSMRLANLLMLLSHVRHASNKGMEHLLNMKCKNVVPVYDLLLEMLNAHVLRGCKSSITGSECSPAEDSKSKEGSQNPQSQ

SEQ ID NO: 107 - DNA, 3289 bp, Homo sapiens
ggaaccaggaccagcagggacccttcaagatgtgcctcaactacgaggtgcgcgtgctctgctgcgagacccccagaggctgcccggtgacctctgtgaccccatatgggacttctcctaccaatgctctgtatccttccctgtctacttccatggtatccgcctccgtggcatccacctctgtggcatccagctctgtggcatccagctctgtggcttactccacccaaacctgcttctgcaacgtggctgaccggctctaccctgcaggatccaccatataccgccacagagacctcgctggccattgctattatgccctgtgtagccaggactgccaagtggtcagaggggttgacagtgactgtcggtccaccacgctgcctcctgccccagccacgtccccttcaatatccacctccgagcccgtcactgagctgggatgcccaaatgcggttccccccagaaagaaaggtgagacctgggccacacccaactgctccgaggccacctgtgagggcaacaacgtcatctccctgagcccgcgcacgtgcccgagggtggagaagcccacttgtgccaacggctacccggctgtgaaggtggctgaccaagatggctgctgccatcactaccagtgccagtgtgtgtgcagcggctggggtgacccccactacatcaccttcgacggcacctactacaccttcctggacaactgcacgtacgtgctggtgcagcagattgtgcccgtgtatggccacttccgcgtgctcgtcgacaactacttctgcggtgcggaggacgggctctcctgcccgaggtccatcatcctggagtaccaccaggaccgcgtggtgctgacccgcaagccagtccacggggtgatgacaaacgagatcatcttcaacaacaaggtggtcagccccgccttccggaaaaacggcatcgtggtctcgcgcatcggcgtcaagatgtacgcgaccatcccggagctgggagtccaggtcatgttctccggcctcatcttctccgtggaggtgcccttcagcaagtttgccaacaacaccgagggccagtgcggcacttgcaccaacgacaggaaggatgagtgccgcacgcctagggggacggtggtcgcttcctgctccgagatgtccggcctctggaacgtgagcatccctgaccagccagcctgccaccggcctcacccgacgcccaccacggtcgggcccaccacagttgggtctaccacggtcgggcccaccacagttgggtctaccaccgtcgggcccaccacaccgcctgctccgtgcctgccatcacccatctgccacctgattctgagcaaggtctttgagccgtgccacactgtgatccccccactgctgttctatgagggctgcgtctttgaccggtgccacatgacggacctggatgtggtgtgctccagcctggagctgtacgcggcactctgcgcgtcccacgacatctgcatcgattggagaggccggaccggccacatgtgcccattcacctgcccagccgacaaggtgtaccagccctgcggcccgagcaacccctcctactgctacgggaatgacagcgccagcctcggggctctgccggaggccggccccatcaccgaaggctgcttctgtccggagggcatgaccctcttcagcaccagtgcccaagtctgcgtgcccacgggctgccccaggtgtctggggccccacggagagccggtgaaggtgggccacaccgtcggcatggactgccaggagtgcacgtgtgaggcggccacgtggacgctgacctgccgacccaagctctgcccgctgccccctgcctgccccctgcccggcttcgtgcctgtgcctgcagccccacaggccggccagtgctgcccccagtacagctgcgcctgcaacaccagccgctgccccgcgcccgtgggctgtcctgagggcgcccgcgcgatcccgacctaccaggagggggcctgctgcccagtccaaaactgcagctggacagtgtgcagcatcaacgggaccctgtaccagcccggcgccgtggtctcctcgagcctgtgcgaaacctgcaggtgtgagctgccgggtggccccccatcggacgcgtttgtggtcagctgtgagacccagatctgcaacacacactgccctgtgggcttcgagtaccaggagcagagcgggcagtgctgtggcacctgtgtgcaggtcgcctgtgtcaccaacaccagcaagagccccgcccacctcttctaccctggcgagacctggtcagacgcagggaaccactgtgtgacccaccagtgtgagaagcaccaggatgggctcgtggtggtcaccacgaagaaggcgtgccccccgctcagctgttctctggacgaggcccgcatgagcaaggacggctgctgccgcttctgcccgctgcccccgcccccgtaccagaaccagtcgacctgtgctgtgtaccataggagcctgatcatccagcagcagggctgcagctcctcggagcccgtgcgcctggcttactgccgggggaactgtggggacagctcttccatgtactcgctcgagggcaacacggtggagcacaggtgccagtgctgccaggagctgcggacctcgctgaggaatgtgaccctgcactgcaccgacggctccagccgggccttcagctacaccgaggtggaagagtgcggctgcatgggccggcgctgccctgcgccgggcgacacccagcactcggaggaggcggaacccgagcccagccaggaggcagagagtgggagctgggagagaggcgtccagtgtcccccatgcactgaccagcactgccgccctcctgacctccaaggagaacctcccatatgtcctctgagctcggcttccaaggccagtggaacttgtgcccctgtccaggcggctgcagctttgaacacactgtccacgcccgctttcttgtggagggtgtgggctatgggtcacctgctgcctggaggaggggcccttacccaccccgcctgcagccacctctcaggaccagccccggggctggccgagctcctctggccatgcatccagcctgctgttctggggacgtgagcatcacctgagggtctcaggaatgacgcttggacatggtgatcagctgcctggtggctgcaggaggaagaacctcactcctacctcagccctcagcctgcgctcccctcctcagtacacggccaatctgttgcataaatacacttgagcattttgca

SEQ ID NO: 108 - protein, 1042 aa, Homo sapiens
NQDQQGPFKMCLNYEVRVLCCETPRGCPVTSVTPYGTSPTNALYPSLSTSMVSASVASTSVASSSVASSSVAYSTQTCFCNVADRLYPAGSTIYRHRDLAGHCYYALCSQDCQVVRGVDSDCRSTTLPPAPATSPSISTSEPVTELGCPNAVPPRKKGETWATPNCSEATCEGNNVISLSPRTCPRVEKPTCANGYPAVKVADQDGCCHHYQCQCVCSGWGDPHYITFDGTYYTFLDNCTYVLVQQIVPVYGHFRVLVDNYFCGAEDGLSCPRSIILEYHQDRVVLTRKPVHGVMTNEIIFNNKVVSPAFRKNGIVVSRIGVKMYATIPELGVQVMFSGLIFSVEVPFSKFANNTEGQCGTCTNDRKDECRTPRGTVVASCSEMSGLWNVSIPDQPACHRPHPTPTTVGPTTVGSTTVGPTTVGSTTVGPTTPPAPCLPSPICHLILSKVFEPCHTVIPPLLFYEGCVFDRCHMTDLDVVCSSLELYAALCASHDICIDWRGRTGHMCPFTCPADKVYQPCGPSNPSYCYGNDSASLGALPEAGPITEGCFCPEGMTLFSTSAQVCVPTGCPRCLGPHGEPVKVGHTVGMDCQECTCEAATWTLTCRPKLCPLPPACPLPGFVPVPAAPQAGQCCPQYSCACNTSRCPAPVGCPEGARAIPTYQEGACCPVQNCSWTVCSINGTLYQPGAVVSSSLCETCRCELPGGPPSDAFVVSCETQICNTHCPVGFEYQEQSGQCCGTCVQVACVTNTSKSPAHLFYPGETWSDAGNHCVTHQCEKHQDGLVVVTTKKACPPLSCSLDEARMSKDGCCRFCPLPPPPYQNQSTCAVYHRSLIIQQQGCSSSEPVRLAYCRGNCGDSSSMYSLEGNTVEHRCQCCQELRTSLRNVTLHCTDGSSRAFSYTEVEECGCMGRRCPAPGDTQHSEEAEPEPSQEAESGSWERGVQCPPCTDQHCRPPDLQGEPPICPLSSASKASGTCAPVQAAAALNTLSTPAFLWRVWAMGHLLPGGGALTHPACSHLSGPAPGLAELLWPCIQPAVLGT

SEQ ID NO: 109 - DNA, 446 bp, Homo sapiens
  misc_feature (420)..(421): n = unknown
tttgtgagaaaccacaagctccctgggaggagtggtctttactcccattcaacggaagaggaagcagagcaagcgcatcccagcccgtgcgcagcgtggcccgagtctgtccagtcctggctgctgggcaccgcgccggccctgggatgccacagcagtgaccaggacacacagctcctgctcttgcagtggcaggaggagctccaacatgaattaaaagtaaataaccaagcagaacatcagggagagagaagggccaggatttaaactaggtgggggctgagagtgaattcggggtgcagagcagggagggctcttggggcaacgctgctgcgtctcggagtgaatgacaggagggagcttcccaggcggaggggcggctggtgcaggttcttcagccaggaagggggcatgcaccannagactgggagtgagaaggagcggaa

SEQ ID NO: 110 - protein, 143 aa, Homo sapiens
  MISC_FEATURE (135)..(136): X = unknown
FVRNHKLPGRSGLYSHSTEEEAEQAHPSPCAAWPESVQSWLLGTAPALGCHSSDQDTQLLLLQWQEELQHELKVNNQAEHQGERRARILRVNSGCRAGRALGATLLRLGVNDRRELPRRRGGWCRFFSQEGGMHXXTGSEKER

SEQ ID NO: 111 - DNA, 4423 bp, Homo sapiens
agcggagactcacctctgacgccgctcttcgcgctccgctggtgaatggagtcgcgttctctgttttgctgttgctgctgcctttgtgacgggatcgctttctcccatcgaaccttctagttgcttattgcagctttgtctcctcagcactctgctgtcactcaaggaagtatcatcaagaacaaggagggcatggatgctaagtcactaactgcctggtcccggacactggtgaccttcaaggatgtatttgtggacttcaccagggaggagtggaagctgctggacactgctcagcagatcgtgtacagaaatgtgatgctggagaactataagaacctggtttccttgggttatcagcttactaagccagatgtgatcctccggttggagaagggagaagagccctggctggtggagagagaaattcaccaagagacccatcctgattcagagactgcatttgaaatcaaatcatcagtttccagcaggagcatttttaaagataagcaatcctgtgacattaaaatggaaggaatggcaaggaatgatctctggtatttgtcattagaagaagtctggaaatgtagagaccagttagacaagtatcaggaaaacccagagagacatttgaggcaagtggcattcacccaaaagaaagtacttactcaggagagagtctctgaaagtggtaaatatgggggaaactgtcttcttcctgctcagctagtactgagagagtatttccataaacgtgactcacatactaaaagtttaaaacatgatttagttcttaatggtcatcaggacagttgtgcaagtaacagtaatgaatgtggtcaaactttctgtcaaaacattcaccttattcagtttgcaagaactcacacaggtgataaatcctacaaatgccctgataatgacaactctcttactcatggttcatctcttggtatatcaaagggcatacatagagagaaaccctatgaatgtaaggaatgtggaaaattcttcagctggcgctctaatcttactaggcatcagcttattcatactggagaaaaaccgtatgagtgtaaagaatgtggaaagtctttcagccggagttctcacctcattggacatcaaaagacccatactggtgaggaaccctatgaatgtaaagaatgtggaaaatccttcagctggttctctcaccttgttactcatcagagaactcatacaggagacaaactgtacacatgtaatcagtgtgggaaatcttttgttcatagctctaggcttattagacaccagaggacacatactggagagaaaccctatgaatgtcctgaatgtgggaaatctttcagacagagcacacatctcattctgcatcagagaacccatgtgagagtgaggccctatgaatgcaatgaatgtggaaagtcttacagccagagatctcaccttgttgtgcatcatagaattcacactggactaaaaccttttgagtgtaaggattgtggaaaatgttttagtcgaagctctcacctttattcacatcaaagaacccacactggagagaaaccatatgagtgtcatgattgtggaaaatctttcagccagagttctgcccttattgtgcatcagaggatacacactggagagaaaccatatgaatgctgtcagtgtgggaaagccttcatccggaagaatgacctcattaagcaccagagaattcatgttggagaagagacctataaatgtaatcaatgtggcattatcttcagccagaactctccatttatagttcatcaaatagctcacactggagagcagttcttaacatgcaatcaatgtgggacagcgcttgttaatacctctaaccttattggataccagacaaatcatattagagaaaatgcttactaataaatatgggaatttttcacaaagagcaatgactttattttgcattggagaactcctggagataagctgtacaaattgaatctatgtggaaatgctttcagtcttgttactatcctattgcacattagagaattggtcctggaagggaaagaaaccacagattttatttcagtacacaaatccatcagattttcttcttttcatgaattcctacagaagtaattggcctgagagcattcttgaccaagtcttaaatgctagaatctgagaaggaattattaaataggtgagttgttgagcgagaaccacttcatttgaaaagaaatgagtatgctactatagggagagttgttgctgagaattaagaaatgatacagttaatgcaacaaaagatggaaaataatatttcagtcaatatgtcattgttttcttgactatgtctctcttctgggacatttagtagtgtttggtatgttttatgtgtctggtagaaaccatattttggttaacagcaagaaaaatgcttataatgtagtacaattaaaaacaacacatctccactaccagtgctaacccatttttaagtacatttgcatgtgggcaagaattgaaagtatacagataattgaacagaattgatttgttagataaggagattttgactgagttttatagtctgtttaatgttgctgtaataattattttaagaaacttttaaatattgtaagaggatatctagtttctctattctaccatcaaagaagcttttgagtaccacctgttaatgagctttcctattctaaattgttttgggtcacagagttccactttttccactcttattagcactgcaaaagctcctgagaatttaaaaacacagtaattctctggatgttaggacctaggggaacattgggcatttgaacatatcagggagggtccccattttagtgggaacaagtatttaaacaatatttagagcaagtgtcctcatgtgataaacagagcacagtccaaagataccctctttctcaaggtagtcttttatctttataaagaaagattagtgtttaagagcgtagacttgagctagactacccaggttgaaaccccactagctgggtgatcttgaacatgctgcttagcttctctgtgccaaacttactgatatcctcatctgtaaattagcgataataatagtacttacctggtaggattatggtgagtattaaatgagtaaatggaaacagcttagaatagtgcctgacatatattatgttctctgtagttactggctgtgattattaataatattgccgcaccctaatatctgttatttaattgaaatctgcttgtgtgcttataagaatttactgagttctcacttcccttacagtcatacatggtttttcccttttgcctaaatcagaactcaacagcctgggaaaatcactgacaaatagtggatataggtttcatttctgaggatcaataaacagcttgtaatgttgtatacacatttattctgtttgtacaaaggttttccattctatggagaggatcccagtcttcagattctctggtaagttaataacccacaaaagattcaggaagaggatctattttaattttctctttcattctataaatcagtctgttgtatatagggactgaccatgattctccattttctggcataaatattagctgctcaatgattgattgttgaatgatagatgaagtattgctgaagccaaccagagatcttgatctctctctgaggaaaaaacctagaaatgatggttagaatcaggagacttgagaactacgaggaacatggcagcctctagctcatacttgtcgttgtacaattgagatcaagtgaattggccccggtctcacattttcagtgaagtcagactcagaactaggtcctgggtttcatgtttcctgctgctcttctcactgtgtacacaccatgcccacatacaacatacctatcagaaatggttttcattaagggagtagaatagtcacttaactggggctcttaacattgctaataacctgtggctcaatttcctcaactgtataatgaggttactactagtatctacctcaaagcgttgtcatgtggattgagatgatatgtatgaatcacataaaagagtgcctggcacatagtaggtgccattaataatattactattgttaacaccttaagggtctaacttgtaatgaagacagaaatatgtatgaggatgatcactgaaatatttatgacagtgcataatttgcaaaataaaaaatgtacactagcataatatttgtggcatatccgtgtaatggaagattatgcaggcattaaaatatgtacacaaaaagtttggtaaaggaaaaatgctgtcatgtgttacaaaagcatgataaataattgttaatatggaataagctcaaatatgtcaaaataaatgtaaaaaatgagtgttgctcaaaaaaaaaaaaaaaa

SEQ ID NO: 112 - protein, 573 aa, Homo sapiens
MDAKSLTAWSRTLVTFKDVFVDFTREEWKLLDTAQQIVYRNVMLENYKNLVSLGYQLTKPDVILRLEKGEEPWLVEREIHQETHPDSETAFEIKSSVSSRSIFKDKQSCDIKMEGMARNDLWYLSLEEVWKCRDQLDKYQENPERHLRQVAFTQKKVLTQERVSESGKYGGNCLLPAQLVLREYFHKRDSHTKSLKHDLVLNGHQDSCASNSNECGQTFCQNIHLIQFARTHTGDKSYKCPDNDNSLTHGSSLGISKGIHREKPYECKECGKFFSWRSNLTRHQLIHTGEKPYECKECGKSFSRSSHLIGHQKTHTGEEPYECKECGKSFSWFSHLVTHQRTHTGDKLYTCNQCGKSFVHSSRLIRHQRTHTGEKPYECPECGKSFRQSTHLILHQRTHVRVRPYECNECGKSYSQRSHLVVHHRIHTGLKPFECKDCGKCFSRSSHLYSHQRTHTGEKPYECHDCGKSFSQSSALIVHQRIHTGEKPYECCQCGKAFIRKNDLIKHQRIHVGEETYKCNQCGIIFSQNSPFIVHQIAHTGEQFLTCNQCGTALVNTSNLIGYQTNHIRENAY

SEQ ID NO: 113 - DNA, 1130 bp, Homo sapiens
ggcccttagagtcttggttgccaaacagatttgcagatcaaggagaacccaggagtttcaaagaagcgctagtaaggtctctgagatccttgcactagctacatcctcagggtaggaggaagatggcttccagaagcatgcggctgctcctattgctgagctgcctggccaaaacaggagtcctgggtgatatcatcatgagacccagctgtgctcctggatggttttaccacaagtccaattgctatggttacttcaggaagctgaggaactggtctgatgccgagctcgagtgtcagtcttacggaaacggagcccacctggcatctatcctgagtttaaaggaagccagcaccatagcagagtacataagtggctatcagagaagccagccgatatggattggcctgcacgacccacagaagaggcagcagtggcagtggattgatggggccatgtatctgtacagatcctggtctggcaagtccatgggtgggaacaagcactgtgctgagatgagctccaataacaactttttaacttggagcagcaacgaatgcaacaagcgccaacacttcctgtgcaagtaccgaccatagagcaagaatcaagattctgctaactcctgcacagccccgtcctcttcctttctgctagcctggctaaatctgctcattatttcagaggggaaacctagcaaactaagagtgataagggccctactacactggcttttttaggcttagagacagaaactttagcattggcccagtagtggcttctagctctaaatgtttgccccgccatccctttccacagtatccttcttccctcctcccctgtctctggctgtctcgagcagtctagaagagtgcatctccagcctatgaaacagctgggtctttggccataagaagtaaagatttgaagacagaaggaagaaactcaggagtaagcttctagaccccttcagcttctacacccttctgccctctctccattgcctgcaccccaccccagccactcaactcctgcttgtttttcctttggccataggaaggtttaccagtagaatccttgctaggttgatgtgggccatacattcctttaataaaccattgtgtacataa

SEQ ID NO: 114 - protein, 158 aa, Homo sapiens
MASRSMRLLLLLSCLAKTGVLGDIIMRPSCAPGWFYHKSNCYGYFRKLRNWSDAELECQSYGNGAHLASILSLKEASTIAEYISGYQRSQPIWIGLHDPQKRQQWQWIDGAMYLYRSWSGKSMGGNKHCAEMSSNNNFLTWSSNECNKRQHFLCKYRP

SEQ ID NO: 115 - DNA, 447 bp, Homo sapiens
cccgtcttgacacaccgcagctgacaaggagaagtaaaatagggcacccaaactactctgcgctttaccctctcaaacacttgtttttaaatcctttgcatctagtcagtcattcaacatgtatcaagcaccagcagctattcgtagcacagctgttaagacctggaataataaaaccttaagactatttggcaacttactcctgaaaggtaatatacggataatttcatctgtaacacgcagatgaggaaattgacctcacagatttaatgtaaattcagagtttacaccaatttaaccgcaacaaataaggagctgtcaatatatatttaataaggaacacacaaaaaaaaagctgaataaatccacttcctaccttctgctccagttgcctctgccagctggtgaaagcttaaggagctgagccctcttagcctcgaggatgag

SEQ ID NO: 116 - protein, 59 aa, Homo sapiens [sequence omitted]

SEQ ID NO: 117 - DNA, 319 bp, Homo sapiens
ggtgaagctcccagccatcagccatgagggtcttgtatctcctcttctcgttcctcttcatattcctgatgcctcttccaggtgtttttggtggtataggcgatcctgttacctgccttaagagtggagccatatgtcatccagtcttttgccctagaaggtataaacaaattggcacctgtggtctccctggaacaaaatgctgcaaaaagccatgaggaggccaagaagctgctgtggctgatgcggattcagaaagggctccctcatcagagacgtgcgacatgtaaaccaaattaaactatggtgtccaaagata

SEQ ID NO: 118 - protein, 64 aa, Homo sapiens
MRVLYLLFSFLFIFLMPLPGVFGGIGDPVTCLKSGAICHPVFCPRRYKQIGTCGLPGTKCCKKP

SEQ ID NO: 119 - DNA, 582 bp, Homo sapiens
gggggccaaacaccttcctgacaccatgagggccagcagcttcttgatcgtggtggtgttcctcatcgctgggacgctggttctagaggcagctgtcacgggagttcctgttaaaggtcaagacactgtcaaaggccgtgttccattcaatggacaagatcccgttaaaggacaagtttcagttaaaggtcaagataaagtcaaagcgcaagagccagtcaaaggtccagtctccactaagcctggctcctgccccattatcttgatccggtgcgccatgttgaatccccctaaccgctgcttgaaagatactgactgcccaggaatcaagaagtgctgtgaaggctcttgcgggatggcctgtttcgttccccagtgagagggagccggtccttgctgcacctgtgccgtccccagagctacaggctccatctggtcctaagtccctgctgcccttccccttcccacactgtccattcttcctcccattcaggatgcccacggctggagctgcctctctcatccactttccaataaagagttccttctgcaaaaaaaaaaaaaaaaaaaaaaaaaaaaaaa

SEQ ID NO: 120 - protein, 117 aa, Homo sapiens
MRASSFLIVVVFLIAGTLVLEAAVTGVPVKGQDTVKGRVPFNGQDPVKGQVSVKGQDKVKAQEPVKGPVSTKPGSCPIILIRCAMLNPPNRCLKDTDCPGIKKCCEGSCGMACFVPQ

SEQ ID NO: 121 - DNA, 3005 bp, Homo sapiens
gcggcagsgcgcggcagcagaagctcggctcagcggctgggggtggccgctcgaatctgccagggcacctcgctccctcgcctctggcagcgggaccctgtgggcattgaaatccaactcactcatgcttatttcctgtaatggacaaacttgatgctaatgtgagttctgaggagggtttcgggtcagtggagaaggtggtgctgctcacgtttctctcgacggttatcctgatggccatcttggggaacctgctggtgatggtggctgtgtgctgggacaggcagctcaggaaaataaaaacaaattatttcattgtatctcttgcttttgcggatctgctggtttcggtgctggtgatgccctttggtgccattgagctggttcaagacatctggatttatggggaggtgttttgtcttgttcggacatctctggacgtcctgctcacaacggcatcgatttttcacctgtgctgcatttctctggataggtattacgccatctgctgccagcctttggtctataggaacaagatgacccctctgcgcatcgcattaatgctgggaggctgctgggtcatccccacgtttatttcttttctccctataatgcaaggctggaataacattggcataattgatttgatagaaaagaggaagttcaaccagaactctaactctacgtactgtgtcttcatggtcaacaagccctacgccatcacctgctctgtggtggccttctacatcccatttctcctcatggtgctggcctattaccgcatctatgtcacagctaaggagcatgcccatcagatccagatgttacaacgggcaggagcctcctccgagagcaggcctcagtcggcagaccagcatagcactcatcgcatgaggacagagaccaaagcagccaagaccctgtgcatcatcatgggttgcttctgcctctgctgggcaccattctttgtcaccaatattgtggatcctttcatagactacactgtccctgggcaggtgtggactgctttcctctggctcggctatatcaattccgggttgaacccttttctctacgccttcttgaataagtcttttagacgtgccttcctcatcatcctctgctgtgatgatgagcgctaccgaagaccttccattctgggccagactgtcccttgttcaaccacaaccattaatggatccacacatgtactaagggatgcagtggagtgtggtggccagtgggagagtcagtgtcacccgccagcaacttctcctttggtggctgctcagcccagtgacacttaggcccctgggacaatgacccagaagacagccatgcctccgaaagagggccaggtcctaagctgctgcttgtgcgcgactgcacccggtattctcttcacctgaggctttccgtccgccagtgcaggaacccggtgctcgctgggcttttcctctgagattccagcaggtggcgctggagggagtcaggggacataatggcctccttgttcactttttatttcccaacactccctcttcccagattctctgcttttgccgcgtggtctctggtgtctctgacatgttcccgtcactcactgtgtctgatctgtctcactcacgttctaagcacgatagcttgctgcgtcctatctcggtcactgatgtctccaaatacgccttctttgctgtgtgggcttccagatatcaacaaaatactccctctctgttcctgtcttagccagaggcgtcgctcctgtcttgcttacttgcttggtcacgtccgtcacagccatgttcaagctatccctgcctcttcttcgccctgttctgtgccagacgctaacacacttttctccctgtgtctgggtccaaacgtgcatcctcttggttggcccccttgtcagtcccagacgtccacttgctcttccttatgtccaatgtctgtcctcctcttcaggacatgctccatttattttccatggaagacacagggtcagagatctgtcagaggaaaatggtctccacagcaactctggagggaagctgaagacagatagcttcctcctggtgtcctggccgctggcgtgtctgccctgagatgctcgctctcctgctgggctagaacgggacgtcttctaaaaagccttgggcagggctagcaacatcgtaggtgtttattaggcttcaggatctttcccatgaacttgtgatatcattttgaaacccttcaatctggctttgttgctgccaaaggagataactgttggaagttcacactggggaaactcattttcccctgcagctcccccaaggtgcaggagggcaggatccagcagcactggggatgccgaggcaatgctgtacttgaagccagaggacccaaattgccgccctggctgtgctgcaaacaagctgtgagatcttgaatagtgttctttcatctctggaccccactttccacatctgtgcactcaagcttggactagaggacctttaagttttctttctgtttctaagacaacagtatgctgctatagccgtctgctacctcgagaagccatggcctgcctgccttttggctttgtttcaaaggaacgaccctcctcatttgggccttttagacccctgacctttccagctttgtccttcagattaatctggatgtcttttattcaaagctgagtcagtggctcttgcgaatgccccatagcagaagtcccgggaaggtaaatgccaaacccagagccatgtgagattctgactttgatcttggctgtggtttaatagcatctcaggattatttatcatattctctttttttcttattgcttataaggtgtcagttattgtttccattgttgtttactttagttctggaactgaaaccgacaggaagaaactttggaataaggaagagaagattgaccaaaccatccaaatgccaaaaagraaaaaaaaaaaaaaaaaaaaaaaaaaaaaaaaaaaaagcggccgctg

SEQ ID NO: 122 - DNA, 1328 bp, Homo sapiens
cggtgcttatttcctgtaatggacaaacttgatgctaatgtgagttctgaggagggtttcgggtcagtggagaaggtggtgctgctcacgtttctctcgacggttatcctgatggccatcttggggaacctgctggtgatggtggctgtgtgctgggacaggcagctcaggaaaataaaaacaaattatttcattgtatctcttgcttttgcggatctgctggtttcggtgctggtgatgccctttggtgccattgagctggttcaagacatctggatttatggggaggtgttttgtcttgttcggacatctctggacgtcctgctcacaacggcatcgatttttcacctgtgctgcatttctctggataggtattacgccatctgctgccagcctttggtctataggaacaagatgacccctctgcgcatcgcattaatgctgggaggctgctgggtcatccccacgtttatttcttttctccctataatgcaaggctggaataacattggcataattgatttgatagaaaagaggaagttcaaccagaactctaactctacgtactgtgtcttcatggtcaacaagccctacgccatcacctgctctgtggtggccttctacatcccatttctcctcatggtgctggcctattaccgcatctatgtcacagctaaggagcatgcccatcagatccagatgttacaacgggcaggagcctcctccgagagcaggcctcagtcggcagaccagcatagcactcatcgcatgaggacagagaccaaagcagccaagaccctgtgcatcatcatgggttgcttctgcctctgctgggcaccattctttgtcaccaatattgtggatcctttcatagactacactgtccctgggcaggtgtggactgctttcctctggctcggctatatcaattccgggttgaacccttttctctacgccttcttgaataagtcttttagacgtgccttcctcatcatcctctgctgtgatgatgagcgctaccgaagaccttccattctgggccagactgtcccttgttcaaccacaaccattaatggatccacacatgtactaagggatgcagtggagtgtggtggccagtgggagagtcagtgtcacccgccagcaacttctcctttggtggctgctcagcccagtgacacttaggcccctgggacaatgacccagaagacagccatgcctccgaaagagggccaggtcctaagctgctgcttgtgcgcgactgcacccggcattctcttcacctgaggctttccgtccgccagtgcaggaacccggtgctcgctggg

SEQ ID NO: 123 - protein, 388 aa, Homo sapiens
MDKLDANVSSEEGFGSVEKVVLLTFLSTVILMAILGNLLVMVAVCWDRQLRKIKTNYFIVSLAFADLLVSVLVMPFGAIELVQDIWIYGEVFCLVRTSLDVLLTTASIFHLCCISLDRYYAICCQPLVYRNKMTPLRIALMLGGCWVIPTFISFLPIMQGWNNIGIIDLIEKRKFNQNSNSTYCVFMVNKPYAITCSVVAFYIPFLLMVLAYYRIYVTAKEHAHQIQMLQRAGASSESRPQSADQHSTHRMRTETKAAKTLCIIMGCFCLCWAPFFVTNIVDPFIDYTVPGQVWTAFLWLGYINSGLNPFLYAFLNKSFRRAFLIILCCDDERYRRPSILGQTVPCSTTTINGSTHVLRDAVECGGQWESQCHPPATSPLVAAQPSDT

SEQ ID NO: 124 - protein, 388 aa, Homo sapiens; identical to SEQ ID NO: 123

SEQ ID NO: 125 - DNA, 2874 bp, Homo sapiens
acagagcgctcccttggaggcacccagggacctggccagccgtgcagctgcccaggcgctatggcgagtgcggtcagggggtcgaggccgtggccccggctggggctccagctccagttcgcggcgctgctgctcgggacgctgagtccacaggttcacactctcaggccagagaacctcctgctggtgtccaccttggatggaagtctccacgcactaagcaagcagacaggggacctgaagtggactctgagggatgatcccgtcatcgaaggaccaatgtacgtcacagaaatggcctttctctctgacccagcggatggcagcctgtacatcttggggacccaaaaacaactgggattaatgaaactgccattcaccatccctgagctggttcatgcttctccctgccgcagctctgatggggtcttctacacaggccggaagcaggatgcctggtttgtggtggaccccgagtcaggggagacccagatgacactgaccacagcgggtccctccaccccccgcctctacatcggccgaacacagtatacggtcaccatgcatgacccaagagccccagccctgcgctggaacaccacctaccgccgctactcagcgccccccatggatggctcacccgggaaatacatgagccacctggcgtcctgtgggatgggcctgctgctcactgtggacccagaaagtggggcagtgctgtggacacaagacctgggcatgcctgtgatgggcgtttacacctggcaccaggacggcctgcgccagctgccgcatctcaccctggctcgagacactctgcatttcctcgccctccgctggggccacatccgactgcctgcctcaggcccccaggacacagccaccctcttctctgccttggatacccagctgctgatgacactgtatgtagggaaggatgaaactggcttctatgtctctaaagcactggtccacacaggagtggccctggtgcctcgtggactgaccctggcccctacagatggccccaccacagatgaggtgacactccaagtctcaggagagcgagagggctcacccagcactgctgttagatacccctcaggcagtgtggccctcccaagccagtggctgctcattggacaccacgagctacccccagtcctgcacactaccatgctgagggtccatcccaccccggggagtggaactgcagagacaagacccccagagaacacccaggccccagccttcttcttggagctattgagcctgagtcgagagaaactttgggactccgagctgcatccagaagaaaagattccggactcctacctggggctgggaccccaagacctgctggcagctagcctcactgctgtcctcctgggagggtggattctatttgtgatgaggcagcagccgcaggtggtggagaagcagcaggagacccccctggtacctgcagacactgctgacatctcccaggatgcccagtccctgcactcgggggtcaccctgaggagcaagaagaggcttcaaagtccctcgaagcaagcccagccactcgacgaccctgaagctgagcaactcaccgtagtggggaagatttccttcaatcccaaggacgtgctgggccacggggcaggcgggactttcgttttccggggacagtttgagggacgagcagtggctgtcaagcggctcctccgcgagtgctttggcctggttcggcgggaagttcaactgctgcaggagtctgacaggcaccccaatgtgctccgctacttctgcaccgagcggggaccccagttccactacattgccctggagctctgccgggcctccttgcaggagtacgtagaaaacccggacctggatcgcgggggcctggagcccgaggtggtgctgcagcagctgatgtctggcctggcccacctgcattctttacacatagtgcaccgggacctgaagccaggcaatattctcatcaccgggcctgacacccagggcctgggcagggtggtgctttcagacttcggcctctgcaagaagctgcctgctggccgctgtagcttcagcctccactccggcatccccggcacggaaggctggatggcgcccgagctcctgcagctcctgccaccaaacagtcctaccagcgctgtggacatcttctctgcaggctgcgtgttctactacgtgctttctggtggcagccacccctttggagacagtctttatcgccaggcaaacatcctcacaggggttccctgtctggctcacctggaggaagaggtccacgacaaggtggttgcccgggacctggttgcagccatgttgagcctactgccacaggcacgcccctctgccccccaggtgctggcccaccccttcttttggagcagagccaagcaactccagttcttccaggatgtcagtgactggctggagaaggagtctgagcaggagcccctgatgagggcactggaggcaggaggctgcacggtggtccgggacaactggcacgagcacatctccatgccgctgcagatagacctgagaaagttccggtcctataaggggacatcagtgcgagacctgctccgtgctgtgaggaacaagaagcaccactacagggagctcccagttgaggtgcgacaggcacttggccaagtccctgacggcttcgtccagtacttcacaaaccgcttcccacagctgctcctccacacgcaccgagtcatgaggagttgcgcctctgagagcctcttcctgccctactacccaccagactcagaggccagggggccgtgccctggggctgcagggaggtgaagtgggccggaggccacacaaatggtctccatgctg

SEQ ID NO: 126 - protein, 925 aa, Homo sapiens
MASAVRGSRPWPRLGLQLQFAALLLGTLSPQVHTLRPENLLLVSTLDGSLHALSKQTGDLKWTLRDDPVIEGPMYVTEMAFLSDPADGSLYILGTQKQLGLMKLPFTIPELVHASPCRSSDGVFYTGRKQDAWFVVDPESGETQMTLTTAGPSTPRLYIGRTQYTVTMHDPRAPALRWNTTYRRYSAPPMDGSPGKYMSHLASCGMGLLLTVDPESGAVLWTQDLGMPVMGVYTWHQDGLRQLPHLTLARDTLHFLALRWGHIRLPASGPQDTATLFSALDTQLLMTLYVGKDETGFYVSKALVHTGVALVPRGLTLAPTDGPTTDEVTLQVSGEREGSPSTAVRYPSGSVALPSQWLLIGHHELPPVLHTTMLRVHPTPGSGTAETRPPENTQAPAFFLELLSLSREKLWDSELHPEEKIPDSYLGLGPQDLLAASLTAVLLGGWILFVMRQQPQVVEKQQETPLVPADTADISQDAQSLHSGVTLRSKKRLQSPSKQAQPLDDPEAEQLTVVGKISFNPKDVLGHGAGGTFVFRGQFEGRAVAVKRLLRECFGLVRREVQLLQESDRHPNVLRYFCTERGPQFHYIALELCRASLQEYVENPDLDRGGLEPEVVLQQLMSGLAHLHSLHIVHRDLKPGNILITGPDTQGLGRVVLSDFGLCKKLPAGRCSFSLHSGIPGTEGWMAPELLQLLPPNSPTSAVDIFSAGCVFYYVLSGGSHPFGDSLYRQANILTGVPCLAHLEEEVHDKVVARDLVAAMLSLLPQARPSAPQVLAHPFFWSRAKQLQFFQDVSDWLEKESEQEPLMRALEAGGCTVVRDNWHEHISMPLQIDLRKFRSYKGTSVRDLLRAVRNKKHHYRELPVEVRQALGQVPDGFVQYFTNRFPQLLLHTHRVMRSCASESLFLPYYPPDSEARGPCPGAAGR

SEQ ID NO: 127 - DNA, 5610 bp, Homo sapiens
aacatttttgaaagatcactcagctttaacacaccttggctgggtctggataaaaaaaaagtgagcactgcaaatttctagaagaaaacatcaggagaagaaagagagagggggatttattcaaagttgtttccaattccttcaaaacctcaaaccaggtggctatggtatggatgtaaccaagaaaaacaaacgagatggaactgaagtcactgagagaattgtcactgaaacagtaaccacaagacttacatccttaccaccaaaaggcgggaccagcaatggctatgctaaaacagcctctcttggtggagggagccggctggagaaacaaagcctgactcatggcagcagcggctacataaactcaactggaagcacacgaggccatgcctccacctctagttacaggagggctcactcacctgcctccactctgcccaactccccaggctcaacctttgaaaggaaaactcacgttacccgccatgcgtatgaagggagctccagtggcaactcttctccggagtaccctcggaaggaatttgcatcttcttcaaccagaggacggagtcaaacacgagagagtgaaattcgagttcgactgcagagtgcgtccccatccacccgatggacagaattggatgatgttaagcgtttgctcaaggggagtcgatcggcaagtgtgagccccacccggaattcctccaacacactccccatccccaagaaaggcactgtggagaccaaaattgtgacagcgagctcccagtcggtgtcaggcacctacgatgcaacgatcctggatgccaaccttccctcccatgtgtggtcctccaccctgcccgcggggtcctccatggggacctatcacaacaacatgacaacccagagctcatccctcctcaacaccaatgcctactctgcgggatcagtcttcggagttccaaacaacatggcgtcctgctcacccactttgcaccctggactcagcacatcctcctcagtgtttggcatgcagaacaatctggcccccagcttgaccaccctgtcccatggcaccaccaccacttccacagcatatggggtgaagaaaaacatgccccagagtcctgcggctgtgaacactggcgtttccacctccgccgcctgcaccacaagtgtgcagagcgatgaccttttgcacaaggactgcaagttcctgatcctagagaaagacaacacacctgctaagaaggagatggagctgctcatcatgaccaaggacagcgggaaggtctttacagcctcccctgccagcatcgctgcaacttctttttcagaagacaccctaaaaaaagaaaagcaagctgcctacaatgctgactcaggcctaaaagccgaagctaatggagacctgaagactgtgtccacaaagggcaagaccaccactgcagatatccacagctacagcagcagtggtggtggtggcagtggaggaggtggcggtgttggtggcgctggcggcggcccttggggaccagcgccagcctggtgcccctgcggctcctgctgcagctggtggaagtggctgctgggcctgctgctcacctggctgctactcctggggctgctcttcggcctcattgctctggcggaggaggtgaggaagctgaaggcgcgtgtggatgagctggagaggatcaggaggagcatactgccctatggggacagcatggatagaatagaaaaggaccgcctccagggcatggcacccgcggcgggagcagacctggacaaaattgggctgcacagtgacagccaggaggagctctggatgttcgtgaggaagaagctaatgatggaacaggaaaatggaaatctccgaggaagccctggccctaaaggtgacatgggaagtccaggccctaaaggagatcgagggttccctgggactccaggtatccctgggcccttgggccacccaggtccacaaggaccaaagggtcaaaaaggcagcgtgggagatcctggcatggaaggccccatgggccagagagggcgagaaggccccatgggacctcgtggtgaggcagggcctcctggatctggagagaaaggggaaagaggggctgctggtgaaccaggtcctcatggcccacctggtgtcccaggttctgtgggtcccaaaggttccagcggctctcctggcccacagggccctccaggtcctgtaggtctccaagggctccgaggtgaagtaggacttcctggtgtcaaaggtgacaaaggaccaatgggaccaccaggacccaaaggtgaccagggtgagaaaggacctcgaggcctcacaggcgagcctggcatgagaggtttgcctggtgctgttggtgagcccggggctaaaggagcaatgggtcctgctggcccagacggacaccaaggcccaagaggtgaacaaggtcttactgggatgcctggaatccgtggcccaccaggaccttctggagacccaggaaagccaggtctcacaggaccccagggacctcagggacttcccggtacccctggccgaccaggaataaaaggtgaaccaggagctccaggcaagatcgtgacttcggaggggtcatcgatgctcactgtcccaggccccccaggacctcctggagccatgggacccccaggacctccaggtgccccaggccctgccggcccagctggtctcccaggacatcaagaagttcttaatttacaaggtcccccaggcccacccggcccacgtgggccaccagggccttccattccaggcccaccaggaccccgaggcccaccaggggagggtttgccaggcccaccaggcccaccaggatcgttcctgtccaactcagaaaccttcctcttcggccccccaggcccacctggccccccaggtcccaagggagaccaaggtcccccaggccccagaggacaccaaggcgagcaaggcctcccaggtttctcaacctcagggtccagttctttcggactcaaccttcagggaccaccaggcccacctggcccccagggaccaaaaggtgacaaaggtgatccgggtgttccaggggctcttggcattcctagtggtccttctgaagggggatcatcaagtaccatgtacgtgtcaggcccgccagggccccctgggccccctgggcctccgggctctatcagcagctctggccaggagattcagcagtacatctctgagtacatgcagagtgacagtattagatcttacctatccggagttcagggtcccccaggcccacctggtcccccaggacctgtcaccaccatcacaggcgagactttcgactactcagagctggcaagccacgttgtgagctacttacggacttcggggtacggtgtcagcttgttctcgtcctccatctcttctgaagacatcctggctgtgctgcagcgggatgacgtgcgtcagtacctacgtcagtacttgatgggccctcggggtccgccagggccaccaggagccagtggagatgggtccctcctgtctttggactatgcagagctgagtagtcgcattctcagctacatgtcgagttctgggatcagcattgggcttcctggtcccccggggccccctggcttgccgggaacctcctatgaggagctcctctccttgctgcgagggtctgaattcagaggcatcgttggacccccaggtcccccgggtccaccagggatcccaggcaatgtgtggtccagcatcagcgtggaggacctctcgtcttacttacatactgccggcttgtcattcatcccaggccctccaggacctcctggtcccccagggcctcgagggcccccgggtgtctcaggagccctggcaacctatgcagctgaaaacagcgacagcttccggagcgagctgatcagctacctcacaagtcctgatgtgcgcagcttcattgttggccccccaggccctcctgggccgcagggaccccctggggacagccgcctcctgtccacggatgcctcccacagtcggggtagcagctcctcctcacacagctcatctgtcaggcggggcagctcctacagctcttccatgagcacaggaggaggtggtgcaggctccctgggtgcaggcggtgcctttggtgaagctgcaggagacaggggtccctatggcactgacatcggcccaggcggaggctatggggcagcagcagaaggcggcatgtatgctggcaatggcggactattgggagctgactttgctggagatctggattacaatgagctggctgtgagggtgtcagagagcatgcagcgtcagggcctactgcaagggatggcctacactgtccagggcccaccaggccagcctgggccacaggggccacccggcatcagcaaggtcttctctgcctacagcaacgtgactgcggacctcatggacttcttccaaacttatggagccattcaaggaccccctgggcaaaaaggagagatgggcactccaggacccaaaggtgacaggggccctgctgggccaccaggtcatcctgggccacctggccctcgaggacacaagggagaaaaaggagacaaaggtgaccaagtctatgctgggcggagaaggagaagaagtattgctgtcaagccgtgagctagccatggcaggacagctcctggaccaggtctcataatgcatgtggcacttaggtccaaggtctccagagggtgaaagctggagtctgtcaatgtcctactgagacagcacagccaacctagctagcaacatttgttttagtctgaacaatatatacttatagaattcagtcaaagatacacaatctgaaacagcttcatggggtggactctaacagtagttgcaatgttttagaatgagacttacttctctgctatctagatctgaactccttggcttctttacttagttcaagccccagcctaggaaagccagttacataaaagttggctcaggagtcttagagctttacctaaatatgagcccagaaaacggaggatgggggtggggcgccttcctggaggtgacacttgatgggggtgtgttctggttactgttctaaggctgtgccatcagctccttcctcccctgttcattctgcattctctagtcagttggctaagaagtgactcttgcaactaaaaaaattaagaaattcacttcccctctaggaggtgatgatagggtttctaatggttatatgtatatcacattcccatttgcttagaaagtctgattgtagctatgattgtccgtaggcccatactagagttcatggatatgttatactgaaccaggccagagcaaacagaaaaagaaggttgagggcaatggacaaggaaggaataaagggagaagagggaaaacagaaaacctgatgctggggacacagcatcagctcaagacgtcaccctccattctgcactcagaaaatggcacttgggggactgggcgcagttggtctttaaccacttttcaatgtctaaaaacatttgtttgtggtctataagatgaaacatcatttcaatcgtaaaatttcccattaaagaagtttttttttctaa

SEQ ID NO: 128 - protein, 1497 aa, Homo sapiens
MDVTKKNKRDGTEVTERIVTETVTTRLTSLPPKGGTSNGYAKTASLGGGSRLEKQSLTHGSSGYINSTGSTRGHASTSSYRRAHSPASTLPNSPGSTFERKTHVTRHAYEGSSSGNSSPEYPRKEFASSSTRGRSQTRESEIRVRLQSASPSTRWTELDDVKRLLKGSRSASVSPTRNSSNTLPIPKKGTVETKIVTASSQSVSGTYDATILDANLPSHVWSSTLPAGSSMGTYHNNMTTQSSSLLNTNAYSAGSVFGVPNNMASCSPTLHPGLSTSSSVFGMQNNLAPSLTTLSHGTTTTSTAYGVKKNMPQSPAAVNTGVSTSAACTTSVQSDDLLHKDCKFLILEKDNTPAKKEMELLIMTKDSGKVFTASPASIAATSFSEDTLKKEKQAAYNADSGLKAEANGDLKTVSTKGKTTTADIHSYSSSGGGGSGGGGGVGGAGGGPWGPAPAWCPCGSCCSWWKWLLGLLLTWLLLLGLLFGLIALAEEVRKLKARVDELERIRRSILPYGDSMDRIEKDRLQGMAPAAGADLDKIGLHSDSQEELWMFVRKKLMMEQENGNLRGSPGPKGDMGSPGPKGDRGFPGTPGIPGPLGHPGPQGPKGQKGSVGDPGMEGPMGQRGREGPMGPRGEAGPPGSGEKGERGAAGEPGPHGPPGVPGSVGPKGSSGSPGPQGPPGPVGLQGLRGEVGLPGVKGDKGPMGPPGPKGDQGEKGPRGLTGEPGMRGLPGAVGEPGAKGAMGPAGPDGHQGPRGEQGLTGMPGIRGPPGPSGDPGKPGLTGPQGPQGLPGTPGRPGIKGEPGAPGKIVTSEGSSMLTVPGPPGPPGAMGPPGPPGAPGPAGPAGLPGHQEVLNLQGPPGPPGPRGPPGPSIPGPPGPRGPPGEGLPGPPGPPGSFLSNSETFLFGPPGPPGPPGPKGDQGPPGPRGHQGEQGLPGFSTSGSSSFGLNLQGPPGPPGPQGPKGDKGDPGVPGALGIPSGPSEGGSSSTMYVSGPPGPPGPPGPPGSISSSGQEIQQYISEYMQSDSIRSYLSGVQGPPGPPGPPGPVTTITGETFDYSELASHVVSYLRTSGYGVSLFSSSISSEDILAVLQRDDVRQYLRQYLMGPRGPPGPPGASGDGSLLSLDYAELSSRILSYMSSSGISIGLPGPPGPPGLPGTSYEELLSLLRGSEFRGIVGPPGPPGPPGIPGNVWSSISVEDLSSYLHTAGLSFIPGPPGPPGPPGPRGPPGVSGALATYAAENSDSFRSELISYLTSPDVRSFIVGPPGPPGPQGPPGDSRLLSTDASHSRGSSSSSHSSSVRRGSSYSSSMSTGGGGAGSLGAGGAFGEAAGDRGPYGTDIGPGGGYGAAAEGGMYAGNGGLLGADFAGDLDYNELAVRVSESMQRQGLLQGMAYTVQGPPGQPGPQGPPGISKVFSAYSNVTADLMDFFQTYGAIQGPPGQKGEMGTPGPKGDRGPAGPPGHPGPPGPRGHKGEKGDKGDQVYAGRRRRRSIAVKP

SEQ ID NO: 129 - DNA, 460 bp, Homo sapiens
  misc_feature (79)..(79): n = unknown
tttttttttttctaaaccttattggaagccagcagtttttctcacaagggtttcccgcacccctctgcctccatgtctntttcctggcccagagagactgcctccctccaaaggagaggaagccttcccctcacaccttcaaatgcccttcagtgatctgtagaacaactcggggcatattcaagaagggcaaaacttcatgcctcttgcccctcaatcctcctttccctttggtttggtttccttacttcttgccaaaaaacagctacctttggcagggaagttattacaatccattgcaagtacttcctccaataatgaacacaacaaaatcctttctttattcatttaaagcacgaagctggccctctttacaaataccctgtttttaataaatcctcggtaatagacatccattcacgagaataaagtgggtacattggagctgaagctggtggta

SEQ ID NO: 130 - protein, 50 aa, Homo sapiens [sequence omitted]

SEQ ID NO: 131 - DNA, 1017 bp, Homo sapiens
ttgcttgagccagcatgtcgcggaggaagcaagcgaagcctcaacatttccaatccgaccccgaagtggcctcgctcccccggcgagatggagacacagaaaagggtcaaccgagtcgccctactaagagcaaggatgcccacgtctgtggccggtgctgtgccgagttctttgaattatcagatcttctgctccacaagaagaactgtactaaaaatcaattagttttaatcgtaaatgaaaatccagcctccccacccgaaaccttctcccccagcccccctcctgataatcctgatgaacaaatgaatgacacagttaacaaaacagatcaagtggactgcagcgacctttcagaacacaacggacttgacagggaagagtccatggaggtggaggccccggttgctaacaaaagcggcagcggcacttccagcggcagccacagcagtaccgccccaagcagcagcagcagcagcagcagcagcagcggcggcggcggcagctcctccacaggtacctcagcgatcacaacctctctacctcaactcggggacctgacaacactgggcaacttctccgtaatcaacagcaacgtcatcatcgagaacctccagagcaccaaggtggcggtggcccagttctcccaggaagcgaggtgcggcggggcctctgggggcaagctggccgtcccagccctcatggaacaactcctagctctgcagcagcagcagatccaccagctgcaattgatcgaacagattcgtcaccaaatattgctgttggcttctcagaatgcagacttgccaacatcttctagtccttctcaaggtactttacgaacatctgccaaaccccttgtcccacgctaagttcccatttatctcagcagctgggcagcaacaagcttggattgggcccagaagccctcgccagcccattctgccaagaattaattgggtggtggaaaacggctatccccccaattccaaggctaactttaaaaaaccagttttt

SEQ ID NO: 132 - protein, 285 aa, Homo sapiens
MSRRKQAKPQHFQSDPEVASLPRRDGDTEKGQPSRPTKSKDAHVCGRCCAEFFELSDLLLHKKNCTKNQLVLIVNENPASPPETFSPSPPPDNPDEQMNDTVNKTDQVDCSDLSEHNGLDREESMEVEAPVANKSGSGTSSGSHSSTAPSSSSSSSSSSGGGGSSSTGTSAITTSLPQLGDLTTLGNFSVINSNVIIENLQSTKVAVAQFSQEARCGGASGGKLAVPALMEQLLALQQQQIHQLQLIEQIRHQILLLASQNADLPTSSSPSQGTLRTSAKPLVPR

SEQ ID NO: 133 - DNA, 482 bp, Homo sapiens
  misc_feature (476)..(476): n = unknown
ctaggaagatggcgcacccggcaatgttccctcgaaggggcagcggtagtggcagcgcatctgctctcaatgcagcaggtaccggcgtcggtagtaatgccacatcttccgaggattttccgcctccgtcgctgcttcagccgccgccccctgcagcatcttctacgtcgggaccacagcctccgcctccacaaagcctgaacctcctttcgcaggctcagctgcaggcacagctcattgcgccaggcggaactcaaatgaaaaagaaaagtggcttccagataactagcgttactcctgctcagatctccgctagtatcagctctaacaacagtatagcagaggacactgagagctatgatgatctggatgaatctcacacggaagatctctcttcttcggagatccttgatgtgtcactttccagggctactgacttaggggagcccgaacgcagctcctcagaagagacctanataact

SEQ ID NO: 134 - protein, 158 aa, Homo sapiens
  MISC_FEATURE (156)..(156): X = unknown
MAHPAMFPRRGSGSGSASALNAAGTGVGSNATSSEDFPPPSLLQPPPPAASSTSGPQPPPPQSLNLLSQAQLQAQLIAPGGTQMKKKSGFQITSVTPAQISASISSNNSIAEDTESYDDLDESHTEDLSSSEILDVSLSRATDLGEPERSSSEETXIT

SEQ ID NO: 135 - DNA, 391 bp, Homo sapiens
ttttttttcattgtgaaaaaatgcagcaatgtaattttaacatctatgtctagagctacagcttgcttttgatttttactcagcaaatgcttggtcaatacatggaaatctacttctttttaactaatgcatagcattctatccaatggatgccctatagttttttatccaggccatattgaccgacatttaagcaatttcaaatcttttactattgcaaacaatgctgcaactcagctttttacatgcgcctttctgcacatgggcaaacattcctctagaaagcaagaaataaaattgctgggttgaaagatgtgtgcattttcagtgttaataatgtcaaattagcctctaacaagatggtgcctatttcatttactatcagaaatgg

SEQ ID NO: 136 - protein, 60 aa, Homo sapiens
MHSILSNGCPIVFYPGHIDRHLSNFKSFTIANNAATQLFTCAFLHMGKHSSRKQEIKLLG

SEQ ID NO: 137 - DNA, 396 bp, Homo sapiens
tttttttttatttgaattcaatatattggtgatgacagtgtgttgatttaaaagagtaaagagaaacagtctttgtattacaatacagttcagatatgtattaatcatgctacacaacaggggcagagtgcacattaaaatccaaaggtgagcccagcttttatttcaaccaatatctttcttcctttttctctagcaaacgatttcacagtatttcctaaaaacagaagaacccacatctgaaacattggtagtttggggtgcatcacaagctctcatatgtagaaagaaactgtaatatgttacaggccatgaggctgtagtgattctcagtgtgctgtactgttaaaaggtagatctccaaaataataaaaagaggtgcgttatttgttggag

SEQ ID NO: 138 - DNA, 3254 bp, Homo sapiens
ggcggcggccgcgcgctgctcggggcccgactgcggcgcgagggcggcgcgggagcgacgctggcccggaccgaggaaactatgccgcagacgtccgttgtcttctccagcatccttgggcccagctgtagcggacaggtgcagcctggcatgggggagcgtggaggcggggccggtggcggctccggggacctcatcttccaagatggacacctcatctctgggtccctggaggccctgatggagcaccttgttcccacggtggactattaccccgataggacgtacatcttcacctttctcctgagctcccgggtctttatgccccctcatgacctgctggcccgcgtggggcagatctgcgtggagcagaagcagcagctggaagccgggcctgaaaaggccaagctgaagtctttctcagccaagatcgtgcagctcctgaaggagtggaccgaggccttcccctatgacttccaggatgagaaggccatggccgagctgaaagccatcacacaccgtgtcacccagtgtgatgaggagaatggcacagtgaagaaggccattgcccagatgacacagagcctgttgctgtccttggctgcccggagccagctccaggaactgcgagagaagctccggccaccggctgtagacaaggggcccatcctcaagaccaagccaccagccgcccagaaggacatcctgggcgtgtgctgcgaccccctggtgctggcccagcagctgactcacattgagctggacagggtcagcagcatttaccctgaggacttgatgcagatcgtcagccacatggactcattggacaaccacaggtgccgaggggacctgaccaagacctacagcctggaggcctatgacaactggttcaactgcctgagcatgctggtggccactgaggtgtgccgggtggtgaagaagaaacaccggacccgcatgttggagttcttcattgatgtggcccgggagtgcttcaacatcgggaacttcaactccatgatggccatcatctctggcatgaacctcagtcctgtggcaaggctgaagaaaacttggtccaaggtcaagacagccaagtttgatgtcttggagcatcacatggacccgtccagcaacttctgcaactaccgtacagccctgcagggggccacgcagaggtcccagatggccaacagcagccgtgaaaagatcgtcatccctgtgttcaacctcttcgttaaggacatctacttcctgcacaaaatccataccaaccacctgcccaacgggcacattaactttaagaaattctgggagatctccagacagatccatgagttcatgacatggacacaggtagagtgtcctttcgagaaggacaagaagattcagagttacctgctcacggcgcccatctacagcgaggaagctctcttcgtcgcctcctttgaaagtgagggtcccgagaaccacgtggaaaaagacagctggaagaccctcaggaccacccttctgaacagagcctgaggcggatgcagcccgcgacgccagaggaagcacgtgcactaactgggtttaaattttgactgatgtgggttgagatgaggaggcctcactggttggggtccattttgtatataacttttatgagaaaaaaatggtaattatttcacgcatcaacctttggcacttacaaagttttttttgtttattttaaataacagggcagggccctgctttggggagggggaggggagagtatcatgggagatggtatccatgataacatcttattctaatgaaatgtagatttttattttctacttttgattattgacatcttatgaaaaaaatattttaaaaaacccagccaaaaccaacgtgagccctgcctgctcggacgcctttccagccagtgtctctgacgtcggggttagtgccttagagggtactggggtctggtcttcctgctctgtggtttgggctgcggtgagtcccactccacctgggcgcctgccctcaggagcctgggctgcgaggctccataggagggctggtggctgggaggtcgcgtccgcacacttctggaagtgagcctttgagtacgggctgtccaaagtttacattttcattttcctttcagggatttgcggggtcagggaggggcagggggcacctggcagcatattttctgtgacaatgtgtccagcaaatcattcttcaactacattttagaaaggaggaaatctaaaataaggtaagggagggaagcatggagttgtcagttttctgggctgtgactgaaagacacactgagctgtgatgaagaaaaatacatggccgactccagggtggtgacatttagagctagtcttgaaacctatcatctacagaggggagggcagccaacagccctcttcccacctgggtaggcagcgccctaattggaattggaaacagaaaattcgccaggccatactgctggagcccattcagataaaactgcccaaatactgagaggtgttttctacacccagctagaggagcacactccattttcccatgtctgacttcgtggtgtgagccctgggccctactgaccatggcgcaggacagctgtccttcagaaagcacacggtcaatccacgtggaccgtctccctcgcaggaactccgcatccttgtccctctctgcattcccagtttccgcaggagccttgatcaatggggaagcctgggtgaggatgggccaggtcccaattcccaaagctcctggaagagcctgaagacattgggaaaggctgggcctggggaggaggcagccctgggcccgttgcccatgcctctggtcctgggtggagcaggaatagttccactgtattgtcacagtgtgtttgcactttctgaggttctagctagtacagattgtatattgatagtacatattgctttgtttatgtctttgagatgagaaaggcttaaaacttgagaatatatatttggaatacagccttagaacggtttctgtacacatccacgtgcacttcacgggtgatcagttctagtacctacttgaaacagtgtctgtctgctactttattttcccaatttgatacataccctgatttgatgttttggtatttgagatgaactctgagtatgaagctgtaccataatgcagggcgtcagttttggtgtgactggacatacttgcttcaataaaagaatacatcactcccaaaaaaaaaaaaaaaa

SEQ ID NO: 139 - protein, 428 aa, Homo sapiens
MEHLVPTVDYYPDRTYIFTFLLSSRVFMPPHDLLARVGQICVEQKQQLEAGPEKAKLKSFSAKIVQLLKEWTEAFPYDFQDEKAMAELKAITHRVTQCDEENGTVKKAIAQMTQSLLLSLAARSQLQELREKLRPPAVDKGPILKTKPPAAQKDILGVCCDPLVLAQQLTHIELDRVSSIYPEDLMQIVSHMDSLDNHRCRGDLTKTYSLEAYDNWFNCLSMLVATEVCRVVKKKHRTRMLEFFIDVARECFNIGNFNSMMAIISGMNLSPVARLKKTWSKVKTAKFDVLEHHMDPSSNFCNYRTALQGATQRSQMANSSREKIVIPVFNLFVKDIYFLHKIHTNHLPNGHINFKKFWEISRQIHEFMTWTQVECPFEKDKKIQSYLLTAPIYSEEALFVASFESEGPENHVEKDSWKTLRTTLLNRA

SEQ ID NO: 140 - DNA, 495 bp, Homo sapiens
ttttttgtggatatgggactttaatatacagtgagaggaatataaatcagcatgactttttgctggtgttatgtaataaaatgtaaaacgtacataccatttcatgcagaaaatttatatccaagaatctatcccaatgaggtagttacataaatatgcaagtatacacaagatgttcatcacaattagaaacaaccaaaatgtccaccaacatgagactagttcaaaaagatacgaggtattcatacaagagactttatgcatccactgaaaagaatcatgtaattcatattggttgactcaaatagaagctccatcacatattttcaagacaaaaggaattacaaagcagtatggttgacataatcccatttatgtgcaaatcaaataaattccagatttcactgtggttcaattcagcccagtgtcacattcacagaaacaacccagcaacaaaaaggcattacagagtaatttcagccttggctctccatt

SEQ ID NO: 141 - protein, 45 aa, Homo sapiens
MQVYTRCSSQLETTKMSTNMRLVQKDTRYSYKRLYASTEKNHVIH

SEQ ID NO: 142 - DNA, 470 bp, Homo sapiens
tattgagatgtttattgaaattccaggtgtggggaacatcaagaataagagagtccctcccgtgaggggcttaggtctagtagaggaaggagatgcacacaaagctacaaagtcacatgagaagtgctctaactgaagtgagcacaggaaattggacctatttgtttgatcctgagatctggacagaaggcaatcctcctccttccttcagaggatacaatggagacccagagcaatctgctcagcaccagtaagctggaagccatgctgccttccacccaattctctgtggggatgctgtgctggtttcagtccctgggtcctgctcctagttcagcctctcttgcttgcttctcagatgtgtctggtggtagaagttgaggaagagaacgaggaggctgagggcttacaggagcacagatgtgttgaacccaacagggaaggggcactcagtgaggagactgtaggaa

SEQ ID NO: 143 - protein, 97 aa, Homo sapiens
LDRRQSSSFLQRIQWRPRAICSAPVSWKPCCLPPNSLWGCCAGFSPWVLLLVQPLLLASQMCLVVEVEEENEEAEGLQEHRCVEPNREGALSEETVG

SEQ ID NO: 144 - DNA, 449 bp, Homo sapiens
taattttcctattaattttattgatatataactgggtcataaaataacactggaagtaattgaataaattttttaaaacgatcttcatatgttatttttcatttgcagccagaggaaaaaaacttgtaactttctgtggaactttccagacaattttacagatatggaccatttttaacagatcttttaacctatacactttttaataagccaaacaggaacgggagaacatcatttcagtgaaacaaacagatggaaacattgtgaatgtcagaaccacagtcaggaatgttccttttttctcatcttcccttattgtcaggttttattgttttcttgaaatgttatctcagtctttaaatggcttctctctacactgagtgaaaatgtgctggccgattcgcatctttgtcaccactcggtgtactcgagataaatgtataaatagg

SEQ ID NO: 145 - protein, 30 aa, Homo sapiens
MSEPQSGMFLFSHLPLLSGFIVFLKCYLSL

SEQ ID NO: 146 - DNA, 423 bp, Homo sapiens
cactgtccaaacagggtttattgacaggcgtttcacggcaacgcatagcaaccccggcggctagggggcgggcctgtgggcgcggccggggcgcggggagacctgcgggccgggccaccggagcccctttcccaatcctggagctgtatacgccacccggaagggccgcggaattggagaggtgctgcagagggtctatacctcttgctgtttcccggctctgctcatcttccccaactgcccttaaggcgcctccgtgggcgcgctgattaggctctcggatgttggtgggaagatcgaaacgaagggctaagcccccctcgcccgggtcctgccggaaagttcagctcggcggcctccaggatcaaaaattttaaaggctgcagcccggtccccagtggatcggccagataacaagaaact

SEQ ID NO: 147 - protein, 88 aa, Homo sapiens
LSKQGLLTGVSRQRIATPAARGRACGRGRGAGRPAGRATGAPFPILELYTPPGRAAELERCCRGSIPLAVSRLCSSSPTALKAPPWAR

SEQ ID NO: 148 - DNA, 661 bp, Homo sapiens
aaaaagcatactgaaagcatttcataaacgatagcactccgtataaagtatgatcaccaagagggcagcttattcttgcttaggactaagtagaaataacattcattcaagattaactctgtcttcctgtctctgaagagtgttgggacagggagagccgccttttccagggtttgcaaaacaagctacatgttgggaccaccaatggagcccgtctccctgggctttcagcttcccctctccagtgggtgctgggaggggctttttctgtgacctgggctggtgactggtgctacatagtgagaagccctgcagggcagtctcaccagcccagggtggccctgcccagccctggtcagtgaagaggagcttccagacacacccatcctgatgttgtgcccatcttccctgaatgcactgagggcggaagggcctagctggagactgccatcacgtagttcttggaggggctgctccggcccagcagcacttggttcttgcaggtgaggagcccacaggaggcggccagtggggcctcctcgtacaagacgcagaatgagccgtcctactcaatgcggtaggacacctcataggggtccacccacagggtcagctcgcatggcagcagctggtgcagctgaggctggctgagtacgatctg

SEQ ID NO: 149 - protein, 38 aa, Homo sapiens
MLCPSSLNALRAEGPSWRLPSRSSWRGCSGPAALGSCR

SEQ ID NO: 150 - DNA, 502 bp, Homo sapiens
gcggccgcctgggcccctggatgcttgcagggaatctacacagggttgtcaggtacgacaagggtgcccagggctgaggagggtgcccatgcggcctcctacaatgcgtatgggaagccggtgaacgccctccctcagggctggccgggtgcgtctggggttgtcctagctccagctgctggaacaaaataccgagcctggggacttaagcaacagaaatgtattttctcacagcctcggagggggaggggaaggtccggtgtcccagggttgccgggctggttctgcggaggcctctcccgctgctgccttctctcaggcggcctctgcgcaggtccgtcccgtgtccctctgccctaacctcctcctgcaactaggacaccagtgggacccggccagggctcatcctcacggctgcttcacacatactcacctgtctcgtagccccttctccacacacgctcgcgttgttggtactgagagtttggattctaaccatgaa

SEQ ID NO: 151 - protein, 119 aa, Homo sapiens [sequence omitted]

SEQ ID NO: 152 - protein, 109 aa, Homo sapiens [sequence omitted]

SEQ ID NO: 153 - DNA, 624 bp, Homo sapiens
tttttttttttaaaattattatatatatcttcaaaattttatttttaatttaaaatataaacaggtttatctacccatcactcctttgatgtcaggataagaccttttctttgcgtgtgggcctgctgatgcaggctgcacagaggacattgattagcacagcaagaagcattatcaatttcagctttagtagaatgaggactcaagacacttgtgaaacaaaatgaaggcaaagtcctatattttgacacttttctctccctcccaaacattcacggttgctttacccacacctaattccacagcatttttttctttaataacacgtcttttatcaggtctttcccaagttttcaactttttttcatagagattactctcttcacactcataattgtttgattttggtaatattgaattaaattacatcgttattaagtacaacttgcaaaaacaagttttggaacaaatacaactgatttttttttttttttttgagatggagtcttgctctgtcttcaaataaaaataaataaataaaactctccaagagcacccatttgctagacactatggggggactatcctgtctactggtgccctcttgtgttaaaacagcaggtc

SEQ ID NO: 154 - protein, 90 aa, Homo sapiens
MKAKSYILTLFSPSQTFTVALPTPNSTAFFSLITRLLSGLSQVFNMKAKSYILTLFSPSQTFTVALPTPNSTAFFSLITRLLSGLSQVFN

SEQ ID NO: 155 - DNA, 304 bp, Homo sapiens
gaaagggtaaaacaaaaaatccacatcctctccccaaccccagcttctgggcggaaatacgggctttcactttaacccctgactggctctggctccagggcctgagatgccttcataatctagtaactgggtcccgggcatcctcgcgaaaccgctgggtcactgccttgctggcagcttcgggggatcgctgggtccccgacttgttggcagcctggagagactgctgggtcccggcctcctgcacctccaccggagaaccctgtgtcccgacctcctggacttccaccgaacgctgggtccc

SEQ ID NO: 156 - protein, 67 aa, Homo sapiens
LRCLHNLVTGSRASSRNRWVTALLAASGDRWVPDLLAAWRDCWVPASCTSTGEPCVPTSWTSTERWV

SEQ ID NO: 157 - DNA, 262 bp, Homo sapiens
tctcaaacatatttgatgtttattactgtatcactttgaatatttgcgagagcctatttacttctagcagaggtttacattagcaatataaagtaataaataaataaataaataaataaataaataaatgaagtccgggtttttcttttcagtgtgggagaccccacataaagcaacaatgtatcatagctttgacactggataaatgggatgttaagagtgcacttctattcaataacatgcaaatggtgacataattcac

SEQ ID NO: 158 - DNA, 483 bp, Homo sapiens
gcggccgcggctgggaggatggtgacacctgcagtgagtgcagctgcagagagtcaggtgccagcggctcctcttttgaggagctggacctggagggtgaggggcccttggaggaaccacggctggaccctgagactgagcccctgggggctaccaagtggccctgagagcccagtaccctgagaagggcaaggagtaacccatgaccagccccctcctgcggggcagggctgcggaaccgagcagactctccagccatcttcctccttcttctgggggcgaggggttcccaggggacgtaactccccctgctctaggcctcttgtgaagccttctcctcactgtcctttaggctcccagggccaaagcagccaaagactgtatcctgcaccagccctgtgggccgacactcctgtgtatctctcttcagactgtcactgagcttccagacccagaataaaccaatgacttacttgttcaaaa

SEQ ID NO: 159 - protein, 54 aa, Homo sapiens
MVTPAVSAAAESQVPAAPLLRSWTWRVRGPWRNHGWTLRLSPWGLPSGPESPVP

SEQ ID NO: 160 - DNA, 576 bp, Homo sapiens
ttggttttaaagttctcttaggtataacttacataaacgttaataaatcttagggtacaccttggtgaattttgtatatgtctatacccaccacggtctccatcaaaatattttatcgtcccagaaatttcccttgggccccacctcatcctcaaaggttatcactattctgatgtctatcaccatagatttgtttttcctgttcatgtaaatggaaccataaacagccctcttgtgtctgttttcttcacttaatatagtgtcattgagatttatctatgttgtattatcagtagtttatgctttttaattgctgggtatagtccatagtctgaatataccacaatttaaaaattctattctgtttacaaacatttgagttctgtcctccaggttcatccatgttatcacaaatgacagaatttccttcctcatcaaggctgaatagtattccattgtgtagatataccacattttctttatccattcatccaccgatggacagttaggttgattccatatcttggctattgtgaataatcctgcatgttttattgttatgaataaagctgctgt

SEQ ID NO: 161 - protein, 30 aa, Homo sapiens
MLSQMTEFPSSSRLNSIPLCRYTTFSLSIH

SEQ ID NO: 162 - DNA, 500 bp, Homo sapiens
ccagccaagccggccatcatcagggccaacagaagcagaagcgccaccggacgcgcttcacccccgcacagctcaacgagttggagaggagcttcgccaagactcactaccccgacatctttatgcgtgaggagctggcactgcgtatcgggctgaccgagtcccgagtgcaggctgcctgtgcgttcctgtatcgagttatctccttctctacccggaaactggtccccatcgccatcccccaatggacacgcaaggcccgtctccggccagtatagcgacatcccggaagaagctcctcaaaatcgaagcccggcgttgtcgggctacagggttcgcctcctccgcctgagaaggcaacctcagcgcccccccgggcggcccagccgagcgcacacctcaactcctgctcgcattattgacaaatattaccccctaatgagtttgtgttaagcgtttggataaaaggaggaatgcaacaattatacagaaaacaagag

SEQ ID NO: 163 - protein, 51 aa, Homo sapiens [sequence omitted]

SEQ ID NO: 164 - DNA, 869 bp, Homo sapiens
  misc_feature (869)..(869): n = unknown
agcggggcttgcaaagcggtagggagacgatcgggccgctggccgctgtctcggcgttcagcaatagaggccttcccggatctcccgagaggcggggagcgagcctgggtccagcagccttctccctcccgagaacagcagaaaggggggactcgacagaatgacctctgtttccccaaggaagtgcactctgacgataacctcgggagggacgagaagggccgctctttcggagagcggccgccgcccctggagtaggggactcagtggccacgaaggccttccctgctcgcgacctttccacgggaaggcacgaagcttccgatgggggccccggggcgctcctgacttttctacggcgcgagggctctgactctgcggttcaggtttgaaagtcctttggaagctcgcaagtggtggtctcccaccacctgctcggtcatagcaggaagaaggcgcagtgagggcgggagtctggatgagcggagagtagccaccgcggagaagagtgcgggcttgcaggagccaacgaagataactcgaaatgtgggcaggcaggtgtcggtgggtcttgcaaaagtgggaaagcacgagaaaagaacaatgttccgcgtccgcttagaatacggaaacaagtgagctttaaaggaacaatactcattctcattacccctgtccaggaagaaagagtgcttgatcttgcttgcttcccaggtccgctgggcttggagagccagaaagagggctacttggatccccagccaacgccagtggtctgtccccccagcgaagcacttctggccttggtgtgatccccattccttttctcaaatacaaaatcttatgagtcctcggacaggaattacatn

SEQ ID NO: 165 - protein, 85 aa, Homo sapiens [sequence omitted]

SEQ ID NO: 166 - DNA, 496 bp, Homo sapiens
cctttgccagccttctgcatttcctagaaccagctgaatttgccaaaagaagtattaaaggaaaaacacactaactttgcaaattaagaactggtctttgccttctttatgttttgaaactcaaaacagacaaattttctatttttagtagactaaaaagagtaccctagaaatgacctttactttcaatacctgaacgaaccaagcgtagtgatcctaggaggctgttatcagcccacatttaactgaaattttcttgatactcctaagtcttagataactctttcaatattgtatcactaattcctaacatacaatcaatgaataatctgcagaatggcatgtgtgagtgtataacactgaataaattcatctaaaatatacatatttataacttagtagttacactttctagaaatttccccttgttttgaaaagaatagcagtagcaacagaggcaaactggcctatgactgatgttctaggagagaacaga

SEQ ID NO: 167 - protein, 23 aa, Homo sapiens [sequence omitted]

SEQ ID NO: 168 - DNA, 484 bp, Homo sapiens
tttaaccttctaaatttctcaaggacactttattcaaggaccacagagtttacactaactacccagaagccaggaatagcttaaggagagactcaccaccagcagcttcttttcaatcaagtttcacttcaacctcacacccaggaacccattcaaattcctacatttcggtatccttagtcgaactaacttcctgtgccggaagcttttgtctgtctcagtgacttctttctttaacaaattcccttcatctcccccttgagtcaaagcccatggggtccccaggaggcatgcaatatttaccaagggctcttccccgttttcctgcctctgtctggcagttgtttgcctttacttttaggtttgtagtcacagcctgttttttcttccttggacacaccagcttttctgaatggtaggattatttacagtagaattaaccttgtccttcaccccgagaactgagcttgaaattcactaatca

SEQ ID NO: 169 - protein, 48 aa, Homo sapiens [sequence omitted]

SEQ ID NO: 170 - DNA, 3941 bp, Homo sapiens
accatctactccacagtcagctcatccacaactgccatcacctcacctttcactaccgcagagactggggtgacttccacaccttcatccccatcttctctgagtacagacatcccgaccacatccctaagaactctcaccccattatctttgagcaccagcacttcattgactacaaccacagaccttccctctatacccactgatatcagtagcttaccaaccccaatacacatcatttcatcttctccctccatccaaagtacagaaacctcatcccttgtgggcaccacctctcccaccatgtccactgtgagagcgaccctcagaagtactgagaacaccccaatcagttcctttagcacaagtattgttgttacacctgaaaccccaacaacacaggcccctcctgtactgatgtctgccactgggacccaaacatcccctgtacctactactgtcacctttggaagtatggattcctctacgtccactcttcatactcttactccatcaacagccttgagcaagatcatgtcaacatcacagtttcctattcctagcacacattcctccacccttcaaacaactccttcaatcccctctttgcaaacttcactcacatctacaagtgagttcactacagaatctttcactaggggaagtacgtctacaaatgcaatcttgacttcttttagtaccatcatctggtcctcaacacccactattatcatgtcctcttctccatcttctgccagcataactccagtgttcgctactaccattcattctgttccttcgtcaccatacattttcagtacagaaaatgtgggctccgcttctatcacagcctttcctagtctctcttcctcttcaactaccagcacttctccaaccagctcctctctgaccacagctctcactgaaataacccccttttcttatatttcccttccctccaccacaccctgtccaggaactataacaattaccatagtccctgcctcccccactgatccatgtgttgaaatggatcccagcactgaagctacttctcctcccaccactccattaacagtctttccctttactactgaaatggtcacctgtcctagctccatcagtatgcaaactactcttgctacacatatggacacttcttccatgacgccagaaagtgagtccagcatcatacctaatgcttccagttccactggcactgggactgtacccacaaacacagttttcacaagtactcgactgcccaccagtgagacctggctgagcaacaactctgtgatccccacacctcttcctggcgtctctaccatcccgctcaccatgaaaccaagcagtagcctcccgaccatcctgaggacttcaagcaagtcaacacacccatccccacccaccgccaggacttcagagacatcagtggccactacccagactcctaccacccttacaacgcgcaggacaactcccatcacttcttggatgaccacacagtccacgttgaccaccactgcaggcacctgtgacaatggtggcacctgggaacagggccagtgtgcttgccttccggggttttctggggaccgctgtcagctccagaccagatgccagaacgggggccagtgggatggcctcaagtgccagtgccccagcaccttctatggttccagttgtgagtttgctgtggaacaggtggatctagatgtagtggagaccgaggtgggcatggaagtgtctgtggatcagcagttctcgccggacctcaatgacaacacttcccaggcctacagggatttcaacaagaccttctggaatcagatgcagaagatttttgcagacatgcagggcttcaccttcaagggtgtggagatcctgtccctgaggaatggcagcatcgtggtggactacctggtcctgctggagatgcccttcagcccccagctggagagcgagtatgagcaggtgaagaccacgctgaaggaggggctccagaacgccagccaggatgcgaacagctgccaggactcccagaccctgtgttttaagcctgactccatcaaggtgaacaacaacagcaagacagagctgaccccggaagccatctgccgccgcgccgctcccacgggctatgaagagttctacttccctctggtggaggccacccggctccgctgtgtcaccaaatgcacgtcgggcgtggacaacgccatcgactgtcaccagggccagtgcgttctagagacgagcggtcccgcgtgtcgctgctactccaccgacacgcactggttctctggcccgcgctgcgaggtggccgtccactggagggcgctggtcgggggcctgacggccggcgccgcgctgctggtgctgctgctgctggcgctgggcgtccgggcggtgcgctccggatggtggggcggccagcgccgaggccggtcctgggaccaggacaggaaatggttcgagacctgggatgaggaagtcgtgggcactttttcaaactggggtttcgaggacgacggaacagacaaggatacaaatttccatgtggccttggagaacgtggacaccactatgaaggtgcacatcaagagacccgagatgacctcgtcctcagtgtgagccctgcggggccccttcaccaccccctccgccctgccccggacacaagggtctgcattgcgtccatttcaagaggtggccccaggacgcgggcagcccaggctcctgctgttcttgggcaagatgagactgttcccccaaatcccatccttctccttccaacttggctgaaacccacctggagacgcagttcacgtccaggctcttccactgtggaatcttgggcaagtcagtaacgagcctcagtttcctcacctgcaaaacgggtacagcattcctgtatgatagctcacgccgttgttgtgaaaaccacatagacttggtcaattctcggtcctactctgccctcccgtctcagccctcgtgttgccattgcctctctcggatcctccaatcctcacgtccttcacctggtctctggccctggttcttattttctctcaattccctactgcctgtttcttactttgaacctggaggcagcctgcagccccatcccatctcctgccctctcctgatctaactccctgctgcatctcttgctctcattccttagacgtcctccccttttgaccccgttccttcatccatcctgcaccccagtcccccagccctaaatcctccctcctctcctcacatcctggtccctagcaaggtatagatagcctctgtgtcttaggataccccgggtgctgttccctcggtcaccctgttgcccagttccccgtttctcttgctctcattccttgtatcttctccccttctgagcccgtccattcatcggttctgcccccgactcccccagccctaaataccccagctcctaattcccccctcaccccgttgctcaattccccgtttctcttgctctcattccttgtatcttctccccttctgagcctgtccattcatcggtggttctgcccctactcccccagccctaaataccccagctgctgttcctccccatcacccagccaccggattctccattcacccctttctctcacccctggagccccgtgggtgggggcagggcatgagttccccagtccccaaggaaaggcagccccctcagtctccctcctcctcattcccttccatctccctcccctctgccttttaaacccatcccctccgattcccctcctcccccctctctccctggtgtcaactcgattcctgcggtaactctgagccctgaaatcctcagtctccttggcggggaagattggctttggggacaggaagtcggcacatctccaggtctccatgtgcacaatatagagtttattgtaaaaagc

SEQ ID NO: 171 - protein, 878 aa, Homo sapiens
TIYSTVSSSTTAITSPFTTAETGVTSTPSSPSSLSTDIPTTSLRTLTPLSLSTSTSLTTTTDLPSIPTDISSLPTPIHIISSSPSIQSTETSSLVGTTSPTMSTVRATLRSTENTPISSFSTSIVVTPETPTTQAPPVLMSATGTQTSPVPTTVTFGSMDSSTSTLHTLTPSTALSKIMSTSQFPIPSTHSSTLQTTPSIPSLQTSLTSTSEFTTESFTRGSTSTNAILTSFSTIIWSSTPTIIMSSSPSSASITPVFATTIHSVPSSPYIFSTENVGSASITAFPSLSSSSTTSTSPTSSSLTTALTEITPFSYISLPSTTPCPGTITITIVPASPTDPCVEMDPSTEATSPPTTPLTVFPFTTEMVTCPSSISMQTTLATHMDTSSMTPESESSIIPNASSSTGTGTVPTNTVFTSTRLPTSETWLSNNSVIPTPLPGVSTIPLTMKPSSSLPTILRTSSKSTHPSPPTARTSETSVATTQTPTTLTTRRTTPITSWMTTQSTLTTTAGTCDNGGTWEQGQCACLPGFSGDRCQLQTRCQNGGQWDGLKCQCPSTFYGSSCEFAVEQVDLDVVETEVGMEVSVDQQFSPDLNDNTSQAYRDFNKTFWNQMQKIFADMQGFTFKGVEILSLRNGSIVVDYLVLLEMPFSPQLESEYEQVKTTLKEGLQNASQDANSCQDSQTLCFKPDSIKVNNNSKTELTPEAICRRAAPTGYEEFYFPLVEATRLRCVTKCTSGVDNAIDCHQGQCVLETSGPACRCYSTDTHWFSGPRCEVAVHWRALVGGLTAGAALLVLLLLALGVRAVRSGWWGGQRRGRSWDQDRKWFETWDEEVVGTFSNWGFEDDGTDKDTNFHVALENVDTTMKVHIKRPEMTSSSV

SEQ ID NO: 172 - DNA, 538 bp, Homo sapiens
ttttttttttttttgttttttttttaaaaggtactcaaatgtcaactttattgtttctatataaacacttttgtactgaaaactgtaaaaataacaaagtttgctgtgattgcaatccaaatttttgaaagccagaaaatctaattatgctatagcccaactacctaatgctttctttatccataagtaactttgcttcaatttcttgatgttgggtttcatctcactgactttgggcttctaagacacatgggaatacttatatcatcttggcttctttgggtcaaatcaaacagtagagctaaagttattcaaatacattcagattacacagatcccttatgaattactagtatcatagtaggaagaaaaagatacaagaaaaatacatcctagaactcattatcaaaattattggtgtatagtctatactagcatagagtagctttctcaacctgctatataaaattactagcaagaaaaaaaggtgcaagaataagatttatggctgaagtggcttggtgtcttgattccctat

SEQ ID NO: 173 - protein, 31 aa, Homo sapiens
MGILISSWLLWVKSNSRAKVIQIHSDYTDPL

SEQ ID NO: 174 - DNA, 2609 bp, Homo sapiens
  misc_feature (2025)..(2025): n = unknown
  misc_feature (2036)..(2036): n = unknown
  misc_feature (2164)..(2164): n = unknown
  misc_feature (2264)..(2264): n = unknown
gctgatagcacagttctgtccagagaaggaaggcggaataaacttattcattcccaggaactcttggggtaggtgtgtgtttttcacatcttaaaggctcacagaccctgcgctggacaaatgttccattcctgaaggacctctccagaatccggattgctgaatcttccctgttgcctagaagggctccaaaccacctcttgacaatgggaaactgggtggttaaccactggttttcagttttgtttctggttgtttggttagggctgaatgttttcctgtttgtggatgccttcctgaaatatgagaaggccgacaaatactactacacaagaaaaatccttgggtcaacattggcctgtgcccgagcgtctgctctctgcttgaattttaacagcacgctgatcctgcttcctgtgtgtcgcaatctgctgtccttcctgaggggcacctgctcattttgcagccgcacactgagaaagcaattggatcacaacctcaccttccacaagctggtggcctatatgatctgcctacatacagctattcacatcattgcacacctgtttaactttgactgctatagcagaagccgacaggccacagatggctcccttgcctccattctctccagcctatctcatgatgagaaaaaggggggttcttggctaaatcccatccagtcccgaaacacgacagtggagtatgtgacattcaccagcgttgctggtctcactggagtgatcatgacaatagccttgattctcatggtaacttcagctactgagttcatccggaggagttattttgaagtcttctggtatactcaccacctttttatcttctatatccttggcttagggattcacggcattggtggaattgtccggggtcaaacagaggagagcatgaatgagagtcatcctcgcaagtgtgcagagtcttttgagatgtgggatgatcgtgactcccactgtaggcgccctaagtttgaagggcatccccctgagtcttggaagtggatccttgcaccggtcattctttatatctgtgaaaggatcctccggttttaccgctcccagcagaaggttgtgattaccaaggttgttatgcacccatccaaagttttggaattgcagatgaacaagcgtggcttcagcatggaagtggggcagtatatctttgttaattgcccctcaatctctctcctggaatggcatccttttactttgacctctgctccagaggaagatttcttctccattcatatccgagcagcaggggactggacagaaaatctcataagggctttcgaacaacaatattcaccaattcccaggattgaagtggatggtccctttggcacagccagtgaggatgttttccagtatgaagtggctgtgctggttggagcaggaattggggtcaccccctttgcttctatcttgaaatccatctggtacaaattccagtgtgcagaccacaacctcaaaacaaaaaagatctatttctactggatctgcagggagacaggtgccttttcctggttcaacaacctgttgacttccctggaacaggagatggaggaattaggcaaagtgggttttctaaactaccgtctcttcctcaccggatgggacagcaatattgttggtcatgcagcattaaactttgacaaggccactgacatcgtgacaggtctgaaacagaaaacctcctttgggagaccaatgtgggacaatgagttttctacaatagctacctcccaccccaagtctgtagtgggagttttcttatgtggccctcggactttggcaaagagcctgcgcaaatgctgtcaccgatattccagtctggatcctagaaaggttcaattctacttcaacaaagaaaatttttgagttataggaataaggacggtaatctgcattttgtctctttgtatcttcagtaattgagttataggaataaggacggtaatctgcattttgtctctttgtatcttcagtaatttacttggtctcntcaggtttgancagtcactttaggataagaatgtgcctctcaagccttgactccctggtattctttttttgattgcattcaacttcgttacttgagcttcagcaacttaagaacttctgaagttcttaaagttctgaanttcttaaagcccatggatcctttctcagaaaaataactgtaaatctttctggacagccatgactgtagcaaggcttgatagcagaagtttggtggttcanaattatacaactaatcccaggtgattttatcaattccagtgttaccatctcctgagttttggtttgtaatcttttgtccctcccacccccacagaagattttaagtagggtgactttttaaataaaaatttattgaataattaatgataaaacataataataaacataaataataaacaaaattaccgagaaccccatccccatataacaccaacagtgtacatgtttactgtcacttttgatatggtttatccagtgtgaacagcaatttattatttttgctcatcaaaaaataaaggattttttttcacttgaaaaaaaaaaaaaaaaaaaaaaaaaaaaaaa

SEQ ID NO: 175 - DNA, 658 bp, Homo sapiens
ggacctctccagaatccggattgctgaatcttccctgttgcctagaagggctccaaaccacctcttgacaatgggaaactgggtggttaaccactggttttcagttttgtttctggttgtttggttagggctgaatgttttcctgtttgtggatgccttcctgaaatatgagaaggccgacaaatactactacacaagaaaaatccttgggtcaacattggcctgtgcccgagcgtctgctctctgcttgaattttaacagcacgctgatcctgcttcctgtgtgtcgcaatctgctgtccttcctgaggggcacctgctcattttgcagccgcacactgagaaagcaattggatcacaacctcaccttccacaagctggtggcctatatgatctgcctacatacagctattcacatcattgcacacctgtttaactttgactgctatagcagaagccgacaggccacagatggctcccttgcctccattctctccagcctatctcatgatgagaaaaaggggggttcttggctaaatcccatccatccccatataacaccaacagtgtacatgtttactgtcacttttgatatggtcttatccagtgtgaacagcaatttattatttttgctcatcaaaaaataaaggattttcttc

SEQ ID NO: 176 - protein, 564 aa, Homo sapiens
MGNWVVNHWFSVLFLVVWLGLNVFLFVDAFLKYEKADKYYYTRKILGSTLACARASALCLNFNSTLILLPVCRNLLSFLRGTCSFCSRTLRKQLDHNLTFHKLVAYMICLHTAIHIIAHLFNFDCYSRSRQATDGSLASILSSLSHDEKKGGSWLNPIQSRNTTVEYVTFTSVAGLTGVIMTIALILMVTSATEFIRRSYFEVFWYTHHLFIFYILGLGIHGIGGIVRGQTEESMNESHPRKCAESFEMWDDRDSHCRRPKFEGHPPESWKWILAPVILYICERILRFYRSQQKVVITKVVMHPSKVLELQMNKRGFSMEVGQYIFVNCPSISLLEWHPFTLTSAPEEDFFSIHIRAAGDWTENLIRAFEQQYSPIPRIEVDGPFGTASEDVFQYEVAVLVGAGIGVTPFASILKSIWYKFQCADHNLKTKKIYFYWICRETGAFSWFNNLLTSLEQEMEELGKVGFLNYRLFLTGWDSNIVGHAALNFDKATDIVTGLKQKTSFGRPMWDNEFSTIATSHPKSVVGVFLCGPRTLAKSLRKCCHRYSSLDPRKVQFYFNKENF

SEQ ID NO: 177 - protein, 191 aa, Homo sapiens
MGNWVVNHWFSVLFLVVWLGLNVFLFVDAFLKYEKADKYYYTRKILGSTLACARASALCLNFNSTLILLPVCRNLLSFLRGTCSFCSRTLRKQLDHNLTFHKLVAYMICLHTAIHIIAHLFNFDCYSRSRQATDGSLASILSSLSHDEKKGGSWLNPIHPHITPTVYMFTVTFDMVLSSVNSNLLFLLIKK

SEQ ID NO: 178 - DNA, 1683 bp, Homo sapiens
aagcctctttcatcggggcacagacttccttttacttcttccttttgccctctcgcctcctcctcctgggaagaagcggaggcgccggcggtcggccgggatagcaacaggccgggccactgaggcggtgcggaaagtttctgtctgggagtgcggaactggggccgggttggtgtactgctcggagcaatggagccagccttcggggaggtgaaccagctgggaggagtgttcgtgaacgggaggccgctgcccaacgccatccggcttcgcatcgtggaactggcccaactgggcatccgaccgtgtgacatcagccgccagctacgggtctcgcacggctgcgtcagcaagatcctggcgcgatacaacgagacgggctcgatcttgccaggagccatcgggggcagcaagccccgggtcactacccccaccgtggtgaaacacatccggacctacaagcagagagaccccggcatcttcgcctgggagatccgggaccgcctgctggcggacggcgtgtgcgacaagtacaatgtgccctccgtgagctccatcagccgcattctgcgcaacaagatcggcaacttggcccagcagggtcattacgactcatacaagcagcaccagccgacgccgcagccagcgctgccctacaaccacatctactcgtaccccagccctatcacggcggcggccgccaaggtgcccacgccacccggggtgcctgccatccccggttcggtggccatgccgcgcacctggccctcctcgcactccgtcaccgacatcctgggcatccgctccatcaccgaccaagtgagcgacagctccccctaccacagccccaaggtggaggagtggagcagcctgggccgcaacaacttccccgccgccgccccgcatgcggtgaacgggttggagaagggagccctggagcaggaagccaagtacggtcaggcaccaaatggtctcccagctgtgggcagttttgtgtcagcatccagcatggctccttaccctaccccagcccaagtgtcgccttacatgacctacagtgctgctccttctggttatgttgctggacatgggtggcaacatgctgggggcacctcattgtctccccacaactgtgacattccggcatcgctggcgttcaagggaatgcaggcagccagagaaggtagtcattctgtcacggcttccgcgctctgatgggaaattccgtctccagcagcttcacccgggtctccctgtctcagcacctcctcccccaattcccaggtctcacatcccacccctcctgccctccaacccttctgccttgaaagctggctgtacggactcacatcctttgtgctaatgacacttacatatttcttgccataacttttctcttgcagaaaaactgacatgactttaggatttaaaaacaagagcaacaataagcattgaatgagacatttgtgttgcccacatactgtcttaacataacaaagaaacctacacccctcaaagggtttaaggaactttacaaactagtctttggtaaaaccacatgtgtatatttattctaaatcaacctgaacttttgaaatgtgcaattgttgagattttgcaaaatcaataaaggaaaatacttatagaaaaaaaaaaaaaaaaaaaaaaaaaaaaaaaaaaaaa

SEQ ID NO: 179 - protein, 341 aa, Homo sapiens
MEPAFGEVNQLGGVFVNGRPLPNAIRLRIVELAQLGIRPCDISRQLRVSHGCVSKILARYNETGSILPGAIGGSKPRVTTPTVVKHIRTYKQRDPGIFAWEIRDRLLADGVCDKYNVPSVSSISRILRNKIGNLAQQGHYDSYKQHQPTPQPALPYNHIYSYPSPITAAAAKVPTPPGVPAIPGSVAMPRTWPSSHSVTDILGIRSITDQVSDSSPYHSPKVEEWSSLGRNNFPAAAPHAVNGLEKGALEQEAKYGQAPNGLPAVGSFVSASSMAPYPTPAQVSPYMTYSAAPSGYVAGHGWQHAGGTSLSPHNCDIPASLAFKGMQAAREGSHSVTASAL

SEQ ID NO: 180 - DNA, 1253 bp, Homo sapiens
agttgcgacagagtgtggggctgctgacaaatgaactggccatggagaaggaggccacagagaagctgcggaagctcctggcctcccagagcagcggtctccgagggctgtgggactgcctgcccgcagacctagtgggcgagaggagtgcacaaagcaaagcagcggagtccctggaggagctgcgggcctgcatcagcaccctggtggatcggcaccgggaggcccagcaggtgctggctcggctgcaagaagaaaaccagcagttgcgggggtccttgtccccgtgtagggagccaggcacctccttaaaggccccagcatccccccaagtggccgctctggagcaagacctggggaagctggaggaagagctgcgggcagttcaggccacgatgagcgggaagagccaggagatcggaaagctgaagcagctgctctaccaagccacagaggaagtggctgagctaagggcccgggaggcagccagcctacggcaacacgagaaaactcggggttcgctggtggcccaggctcaggcttggggccaggagctaaaggctctgctggaaaagtataatacggcctgccgggaagtgggtcggctgcgggaggcggtggccgaggagcgccgccggagcggggacctggccgctcaggcagccgaacaagagcgccaggccagcgagatgcgggggcgctccgagcagtttgagaaaacggcagagctgctgaaagagaagatggagcatctcattggggcttgccgagacaaggaagccaagatcaaggagttgttgaagaagctggagcagctttcagaagaggttctagcaattcggggagaaaatgctcgccttgccctgcagctgcaggattcccagaagaaccatgaagagatcatctccacctacaggaatcatctactgaatgctgctcggggttacatggaacatgaagtgtacaatatcctgctgcaaatccttagcatggaagaggagtgaggcagcctcactgtgtgccctcagggatacgagattctctgttggaataagaaaccctggttgacagaggcttcatcaggctgtggtgggcgggggtgttggccactaggcaatggtatgggcagggcttcacctgacattatggacctcagacctgagaacctggaccctggaatcagcatggatgagaccagaggaggtatggatggaaacaagctctatggaaaataaagcatgaggcaggacggg

SEQ ID NO: 181 - protein, 320 aa, Homo sapiens
MEKEATEKLRKLLASQSSGLRGLWDCLPADLVGERSAQSKAAESLEELRACISTLVDRHREAQQVLARLQEENQQLRGSLSPCREPGTSLKAPASPQVAALEQDLGKLEEELRAVQATMSGKSQEIGKLKQLLYQATEEVAELRAREAASLRQHEKTRGSLVAQAQAWGQELKALLEKYNTACREVGRLREAVAEERRRSGDLAAQAAEQERQASEMRGRSEQFEKTAELLKEKMEHLIGACRDKEAKIKELLKKLEQLSEEVLAIRGENARLALQLQDSQKNHEEIISTYRNHLLNAARGYMEHEVYNILLQILSMEEE

SEQ ID NO: 182 - DNA, 2839 bp, Homo sapiens
ggcacccggcctgtgccagcttgcagagctcaccaggtgcagacccctgcggccagggcgaggacggatctgagcagctgggcagcaggtgccaccgcctgtgggacccagagggcttgaggacatctgcaatgctccagaagcccaagagcgtgaagctgcgggccctgcgcagcccgaggaagttcggcgtggctggccggagctgccaggaggtgctgcgcaagggctgtctccgcttccagctccctgagcgcggttcccggctgtgcctgtacgaggatggcacggagctgacggaagattacttccccagtgttcccgacaacgccgagctggtgctgctcaccttgggccaggcctggcagggctatgtgagcgacatcaggcgcttcctcagtgcatttcacgagccacaggtggggctcatccaggccgcccagcagctgctgtgtgatgagcaggccccacagaggcagaggctgctggctgacctcctgcacaacgtcagccagaacatcgcggccgagacccgggctgaggacccgccgtggtttgaaggcttggagtcccgatttcagagcaagtctggctatctgagatacagctgtgagagccggatccggagttacctgagggaggtgagctcctacccctccacagtgggtgcggaggctcaggaggaattcctgcgggtcctcggctccatgtgccagaggctccggtccatgcagtacaatggcagctacttcgacagaggagccaagggcggcagccgcctctgcacaccggaaggctggttctcctgccagggtccctttgacatggacagctgcttatcaagacactccatcaacccctacagtaacagggagagcaggatcctcttcagcacctggaacctggatcacataatagaaaagaaacgcaccatcattcctacactggtggaagcaattaaggaacaagatggaagagaagtggactgggagtatttttatggcctgctttttacctcagagaacctaaaactagtgcacattgtctgccataagaaaaccacccacaagctcaactgtgacccgagcagaatctacaaaccccagacaaggttgaagcggaagcagcctgtgcggaaacgccagtgacacgtacacaccacgtcctggtctttgtttgaggcctgacgtgggcatcattttaacaggtgccttttttgtttttttgtttttcgtttttttggtcactccagtagctcctggaaaaaaccttaaaaaatgtttcctccaaatctgatttcattacatttctgaattgttgggtttttttttgttgttttgttttgttttgtagatggagtttcacttttgttgcccaggctggagtgtagtggcgcgatctcggctcagcctcccgagtagctgggattacaggcatgtgccaccacgcccggctaatgtttgtatttttagtagagacggggtttcaccatgttggtcaggctggtctcaaactcctgacctcaggtgatccgcccacctcagcctcccaaagtgctgggatgacaggtgtgagccactgcgcccagcctgaatcatttcttataccttctgacagcccaacttccagaggacagctctggggtactcgttggatgtctgtgagtacctggtcatacgggtcagtagggataagaattgtctctgggctgaggaattcttctgttctctggtttcaccagcgttgggtttgctcatgtaatgtggtcaccatactcaaatggtgtcatggctgaagttggccaccttgcttgagggacaagttgtttatgtatcagctctctgctgggtctccctttccatggcaaatgggcagctccatcctcttgatcttctaaatgcccaaaagaggtgtcatgctttgggggtacgatgtttatactccgtaaagaacatacaaggacattcactgctgatttttttttttgtttgtttgagacagggtctcactctgtcgctcaggctggagtgcagtgatgcaatcttggctcactgcaacctccgcctctcaggttcaagtggttctcctgcctcagcctcccaagtagctgggattacaggcacctaccaccagggccagctaatttttgtatgtttagtagtaacggggtttcaccatgttggccaggctgttctcgaactcctgacctcaggtgatctgcccgcctcggtctcccaaagtgctgggattacaggcatgagccactgcacctgacctgctgaattgtttataatggcaagaaataggaaaccccccaatgtctgttgaacagctatcacgttgaaccacgtgaaactgctgttttctaggccaaaaatggtgagcgatcatttatttcatgattcaacctgatacatttacatagtgcaaaactgtgtcacagtttcaggcttttatgaggaaagcgtttctgtgtagaaactggaagctgttcagggcatcggcagctgaaccctgctccgttggtcagcgttactatcatctcggatcatatggagctcatgtcagccgtgtgggtggcgggtgcacagagacggtctggaaggaaacacgcggatctgaacagcagtaatcctgggggatacgggggttgggctagattacagagggctcattttctacgtcatgtattttatgatacttgaattttttgaaatgggcatttattttataacatgttaaaatgtactttttaaattaagtcattttgtaatatttgaatttttacatttgttgtacaatcaggaaaagcaataaagatttttcaaaaataaaaaaa

SEQ ID NO: 183 - protein, 338 aa, Homo sapiens
MLQKPKSVKLRALRSPRKFGVAGRSCQEVLRKGCLRFQLPERGSRLCLYEDGTELTEDYFPSVPDNAELVLLTLGQAWQGYVSDIRRFLSAFHEPQVGLIQAAQQLLCDEQAPQRQRLLADLLHNVSQNIAAETRAEDPPWFEGLESRFQSKSGYLRYSCESRIRSYLREVSSYPSTVGAEAQEEFLRVLGSMCQRLRSMQYNGSYFDRGAKGGSRLCTPEGWFSCQGPFDMDSCLSRHSINPYSNRESRILFSTWNLDHIIEKKRTIIPTLVEAIKEQDGREVDWEYFYGLLFTSENLKLVHIVCHKKTTHKLNCDPSRIYKPQTRLKRKQPVRKRQ

SEQ ID NO: 184 - DNA, 435 bp, Homo sapiens
atgatcgctcgacatcgatacgactttttccttttcttttctttttttttttttttacatagttgttatcttaaggtgatttccaattttttttccatttacatttttccacaagcattgtccactttattctgtaaccttttcaactaccattttgaaatttgcttttatccatgtggttgtttgtgatgaactacaggttgctgactttcttccccttctgtaaataaagttttcttcctagtatgtcctgtatctcaagaggatctcatcagtggaatcattagatcaaaggatatgactgttgctcagctctctgtgtgtatgtaaattaataggctgtttatttgagcagttgtaggcttacaaaaatattgagtcaaaagtatagaattcccatatattctcctcttctcccttctgtcgtcttctcgc

SEQ ID NO: 185 - protein, 62 aa, Homo sapiens [sequence omitted]

SEQ ID NO: 186 - DNA, 368 bp, Homo sapiens
ttttttttttttttttttgggagtaacagctgcttttattaacatcagaagggcaacagtacaggaagttgggtagatgtggggacaacagagagactgtggcagaggcaggactgcagatctatggaaattgcctggaagagtcagctgtaagggatgagaatcctgagggtaaaagagaaaagggaaagactcctctttgatcttatgaagctgaaataacaagatcttaaacatgagtgagaatctgttgccccaacctaaggtgactttaaatccaaggtaaaaaacacggcatgggtattagtttgaatagggaaaatgagaactctctttgagctcaaaaaaaaaaaaaaaaaaaaaaaatg

SEQ ID NO: 187 - protein, 24 aa, Homo sapiens
FFFFFLGVTAAFINIRRATVQEVG

SEQ ID NO: 188 - protein, 27 aa, Homo sapiens
MWGQQRDCGRGRTADLWKLPGRVSCKG

SEQ ID NO: 189 - DNA, 342 bp, Homo sapiens
gagaagacgacagaagggggttgctgtgggggcaagccagcagtctaggaggtggcacagagatgacatgtgaataatgaccaaggagccggccctccaagactacagggaaaaataacaggggcatcccaagaagagggaagagctggcatgaggctctgctgcagaggccactgaggcaagtgcaagaacagagaggagcaaagcgcggctggagtgagacccagtgaggcagcacgcagcacctcctgggtcactccaagtgtgagggcaggccctggcacactgcttttcttaagaattaaaaaaaaaaaaaaaaaaaaaaaaaaaaagtcgtatcga

SEQ ID NO: 190 - protein, 19 aa, Homo sapiens
LLFLRIKKKKKKKKKKSYR

SEQ ID NO: 191 - DNA, 159 bp, Homo sapiens
gagaagacgacagaagggagaagaagataagatgttggaataattaagtaaagacaaagaagggaatagagaaaagatgtaaccagaggaggagaaagagattaaatgtatgtgaatgttttacaaaaaaaaaaaaaaaaaaaaaaaaagtcgtatcga

SEQ ID NO: 192 - protein, 18 aa, Homo sapiens
MYVNVLQKKKKKKKKSYR

SEQ ID NO: 193 - DNA, 448 bp, Homo sapiens
ttttggtgctacagatcctatttattcttttaaaaggctgcatagggagctctggtggcacaatgaattagtgcatgatacttattgagctcttttgtatgagcacttctgaaggctcatttctagaagtggaattgccaggtcacgtgcattttacattttaatggatacccagtgccaggcatagtgtttcctacatagcaggagcttcgtaaagatctgtggcgtgattacatggtgccagatggccctctagaaaagggacaccattcccactcccaccaaggatgaccagaagagccaagaggtttccatttctgtcaccaggtcacagcaacactaggtttcaggatggccactttccctagggccactctgctactccctaggaggagttaaaggccctgtgatgaaaggaaggcaacgtccgggccgagggtaacttctc

SEQ ID NO: 194 - protein, 29 aa, Homo sapiens
MILIELFCMSTSEGSFLEVELPGHVHFTF

SEQ ID NO: 195 - DNA, 405 bp, Homo sapiens
cccggctatgtggaaagcaacatttctgctgcagagaaaagctatgagcagtcaccacctaacagtgaccaatggaatgtccagttggggtgtgggagctttctgggaagagatactccagcagctgcaacttccatgaatatttagcatatctgagcacagagaagactacggccagtcctgatgcagctggcagccccttctgtgggcaaaaacatctacacagcatgtgtatgtgtgtgagtatatgtgtctaatgtttttaagccagtttcatgatcaggtcattaatctgataagcactcctagagctaggtatactctggcttctcctaaaggcttctatgagtcatctgacaatgaccaggcttaggaataggaatacaaatattggggcagatagct

SEQ ID NO: 196 - protein, 61 aa, Homo sapiens
MECPVGVWELSGKRYSSSCNFHEYLAYLSTEKTTASPDAAGSPFCGQKHLHSMCMCVSICV

SEQ ID NO: 197 - DNA, 478 bp, Homo sapiens
  misc_feature (472)..(472): n = unknown
tttgtgggtgggtcttttttttatttttttaattaacaaataataattgcccatattcatggggtacacaatgatatttccatacatataatgtgtagtgatcagatcagggtaattagcatatccatcatctcaaacacttatcatttctttatgttggaaacattcaacaacttccttccagctattagctatttgaaactacacattattgttaactacagtcatcctacagtggtacaggatatattaaacaataagtatatttcttaaaacatgagcaatggcttggaagacagcacaggtacagagattgtgtgcctagtatggtgcgagaggagataggaaaataggctgaagaaagatggtggtagtttatttccaatttttatggatacataatagttgtacatatttatggggtacatatgatattttgatacaaacatacaacgtataatgatcaaatcanggtaat

SEQ ID NO: 198 - protein, 60 aa, Homo sapiens
MCSDQIRVISISIISNTYHFFMLETFNNFLPAISYLKLHIIVNYSHPTVVQDILNNKYIS

SEQ ID NO: 199 - DNA, 1372 bp, Homo sapiens
tttatccaggccattgcggaaaacagggccgatgctgtgcacccttagatattttggtttcattgatctggggtggggcctaaacattgatactttttgttttgaaatttctccagacgattctgatgtatagtcagaattgaaaactgttgatctgaactataagtaaatacatatgctatgttattttaaaagaatggattgatgattaaacaaatagcttttattatgaaaaattttaaacagattaaagagactgtaatgaacctcatagacccatcacccagaattatcaggtattgagattttggtatatgggcttttatctttttgtttgtacccctttctctttttaaagcaaattctagacatcatactttatacatttcaaaataacttttttactaatcacatctttcacttcagtgccgttatcacacatttaaaaaaatgccagttccttcagatcatgtaacccagtgtgtaattgaatctcctctgttgttcgaaaaaatctcttcacagttattttgtttgaattgggatccaaacgaagtcctcaaaatgcattttgttttatttaattaagttaatccatagcatgttccttcttttaaccctcataccattaaattgttgcagaaactatgttgtttgtcctgtagaaagttccacatgctgtagttgtctatttgcttctyggtgttaaccatttaacttgctcctcttctttgttttctgtgaatggaaattagctctagattagaggcttgattaggttcaacattttttttttttttttttttggcaagcagatatttggttgtcctgttcttagtaatggtgagcttaatcagtagctgcacagggacaacctcttccctctgtctgctgtcaagttccctattaaccttatatctgatggttttatccaataataaattgtttcctgagtcagttatttcattcagaattgcaaagtgatgatttttagtttagttattccttccatgtttaatggaattcttctgtaatgaagaacttctctcaaagctgccaactagggttgccctaaagtataatatatacaagaaaaatagtaatgcttttctttttaattgtcaaatacagtaaggaatttcagtgaggatgtttgtgtgtgttttagagatggggtcttgctttgttgcccaggctggagcgtagtgacacaatcatagctcagtgcagcctcgaattcctggactcaagggatccccctgcctcagcctcctgagtaactaggactacaggcaggtagctgggactacatacgtgtaccagcacacccagctattttttaaaaaaactttgtagaattttgaatgagcca

SEQ ID NO: 200 - protein, 45 aa, Homo sapiens
MPVPSDHVTQCVIESPLLFEKISSQLFCLNWDPNEVLKMHFVLFN

SEQ ID NO: 201 - DNA, 2518 bp, Homo sapiens
tttgcttttgcttatttccgtccatttccctctctgcgcgcggaccttccttttccagatggtgagagccgcggggacacccgacgccggggcaggctgatccacgatcctgggtgtgcgtaacgccgcctggggctccgtgggcgagggacgtgtggggacaggtgcaccggaaactgccagactggagagttgaggcatcggaggcgcgagaacagcactactactgcggcgagacgagcgcggcgcatcccaaagcccggccaaatgcgctcgtccctgggaggggagggaggcgcgcctggagcggggacagtcttggtccgcgccctcctcccgggtctgtgccgggacccgggacccgggagccgtcgcaggtctcggtccaaggggccccttttctcggaagggcggcggccaagagcagggaaggtggatctcaggtagcgagtctgggcttcggggacggcggggaggggagccggacgggaggatgagctcccctggcaccgagagcgcgggaaagagcctgcagtaccgagtggaccacctgctgagcgccgtggagaatgagctgcaggcgggcagcgagaagggcgaccccacagagcgcgaactgcgcgtgggcctggaggagagcgagctgtggctgcgcttcaaggagctcaccaatgagatgatcgtgaccaagaacggcaggaggatgtttccggtgctgaaggtgaacgtgtctggcctggaccccaacgccatgtactccttcctgctggacttcgtggcggcggacaaccaccgctggaagtacgtgaacggggaatgggtgccggggggcaagccggagccgcaggcgcccagctgcgtctacatccaccccgactcgcccaacttcggggcccactggatgaaggctcccgtctccttcagcaaagtcaagctcaccaacaagctcaacggagggggccagatcatgctgaactccttgcataagtatgagcctcgaatccacatagtgagagttgggggtccacagcgcatgatcaccagccactgcttccctgagacccagttcatagcggtgactgcttatcagaacgaggagatcacagctcttaaaattaagtacaatccatttgcaaaagctttccttgatgcaaaggaaagaagtgatcacaaagagatgatggaggaacccggagacagccagcaacctgggtactcccaatgggggtggcttcttcctggaaccagcaccctgtgtccacctgcaaatcctcatcctcagtttggaggtgccctctccctcccctccacgcacagctgtgacaggtacccaaccctgaggagccaccggtcctcaccctaccccagcccctatgctcatcggaacaattctccaacctattctgacaactcacctgcatgtttatccatgctgcaatcccatgacaattggtccagccttggaatgcctgcccatcccagcatgctccccgtgagccacaatgccagcccacctaccagctccagtcagtaccccagcctgtggtctgtgagcaacggcgccgtcaccccgggctcccaggcagcagccgtgtccaacgggctgggggcccagttcttccggggctcccccgcgcactacacacccctcacccatccggtctcggcgccctcttcctcgggatccccactgtacgaaggggcggccgcggccacagacatcgtggacagccagtacgacgccgcagcccaaggccgcctcatagcctcatggacacctgtgtcgccaccttccatgtgaagcagcaaggcccaggtcccgaaagatgcagtgactttttgtcgtggcagccagtggtgactggattgacctactaggtacccagtggcagtctcaggttaagaaggaaatgcagcctcagtaacttccttttcaaagcagtggaggagcacacggcacctttccccagagccccagcatcccttgctcacacctgcagtagcggtgctgtcccaggtggcttacagatgaacccaactgtggagatgatgcagttggcccaacctcactgacggtgaaaaaatgtttgccagggtccagaaactttttttggtttatttctcatacagtgtattggcaactttggcacaccagaatttgtaaactccaccagtcctactttagtgagataaaaagcacactcttaatcttcttccttgttgctttcaagtagttagagttgagctgttaaggacagaataaaatcatagttgaggacagcaggttttagttgaattgaaaatttgactgctctgccccctagaatgtgtgtattttaagcatatgtagctaatctcttgtgttgttaaactataactgtttcatatttttcttttgacaaagtagccaaagacaatcagcagaaagcattttctgcaaaataaacgcaatatgcaaaatgtgattcgtccagttattagtgaagcccctccttttgtgagtatttactgtttattg

SEQ ID NO: 202 - protein, 435 aa, Homo sapiens
MSSPGTESAGKSLQYRVDHLLSAVENELQAGSEKGDPTERELRVGLEESELWLRFKELTNEMIVTKNGRRMFPVLKVNVSGLDPNAMYSFLLDFVAADNHRWKYVNGEWVPGGKPEPQAPSCVYIHPDSPNFGAHWMKAPVSFSKVKLTNKLNGGGQIMLNSLHKYEPRIHIVRVGGPQRMITSHCFPETQFIAVTAYQNEEITALKIKYNPFAKAFLDAKERSDHKEMMEEPGDSQQPGYSQWGWLLPGTSTLCPPANPHPQFGGALSLPSTHSCDRYPTLRSHRSSPYPSPYAHRNNSPTYSDNSPACLSMLQSHDNWSSLGMPAHPSMLPVSHNASPPTSSSQYPSLWSVSNGAVTPGSQAAAVSNGLGAQFFRGSPAHYTPLTHPVSAPSSSGSPLYEGAAAATDIVDSQYDAAAQGRLIASWTPVSPPSM

SEQ ID NO: 203 - DNA, 491 bp, Homo sapiens
aaaattcaacaatccttttatttagctctttggtgccgacgcagtgcctatgtacctatatgcacgcccccctcccccaaggcttacagtctgagggaaaaaaaccacagtccccacccaacctgggacaaaactagacgacctcatgggggggatgcggggaggagaaaccccccctcccaacccaggaagccagagaacgccaccggggcacacaggtcgcctctgctgagtctgtaggttcggtctgggctgagcgccagcagcaatctggcctcccatcccttcctctgggttcctttctcgaggagtaagcgtgctcccaaagaagtcgctagtatctgaggccatctggtggagagcagtggcatggtaaccgagggctcaaagtcgggctcgcattccggggactcgcagagactggactgcgcctgcggcaaggaaggacggagcagagccccctgaggccgagcgggagccagacccaagga

SEQ ID NO: 204 - protein, 79 aa, Homo sapiens [sequence omitted]

SEQ ID NO: 205 - DNA, 500 bp, Homo sapiens
  misc_feature (482)..(482): n = unknown
gatgaaggccagtaacattacttgccattcattataactcacaattgctgaacaactacatgttctagacactgtgccaaattttctacatttaaaagaaatttagttctatccataaccattgcttggcgtttaaattaaaaaaaaaaaagttctaacaattccattctgtaggtgagtgttagtattgtcattttataaatgagaaaactgaggctgaggcattaacttgcctaaaagacacataacgtagcaagatttgaactctgaatctgtagttttcattatggagcataactacgctgagacgacaaatctgaaatctgccataaaaaagatgactggtggaatttatatttctaatataagaacagaatagacaacaaacagctagacaacaaagaatcttacctgaacacagaagatggacttgtggtaaagtatatgaaaatgcctccaagttccctgcctccctatctttntaaaataatattttcccc

SEQ ID NO: 206 - protein, 30 aa, Homo sapiens
MEHNYAETTNLKSAIKKMTGGIYISNIRTE

SEQ ID NO: 207 - DNA, 394 bp, Homo sapiens
agtctggccgcgctcttcgactcgctgcgccacgtccccgggggtgccgagccggcggggggtgaggtggctgcgccggcggccgggctaggaggtgcgggcactgggggcgcgggaggggacgtggcaggccccgcgggggccacggcgatcccaggggccaggaaggtcccgctgcgggcacgcaatctgcctccgtccttcttcacggagccgtcccgggcaggcggcgggcgtgtggcccgtcggggccggacgtgagcttgggcgacctggagaagggcgcggaggccgtggagttctttgagctgctggggcccgactacggcgccggcacggaggcgggagtcttgcttgccgccgagcctctcgacgggttccccgccggagcctt

SEQ ID NO: 208 - protein, 86 aa, Homo sapiens
SLAALFDSLRHVPGGAEPAGGEVAAPAAGLGGAGTGGAGGDVAGPAGATAIPGARKVPLRARNLPPSFFTEPSRAGGGRVARRGRT

SEQ ID NO: 209 - DNA, 430 bp, Homo sapiens
atgatcgctttggagtcgattcgacttttttttttttttttttttttttttaagagacagagtcccaatcagtcacccaggctagagtgcagtggtataagcatggcacattgtaacctccaactcctggcctcaactgatcctcttgcctcaggctcctgagtagctgggactataggcacatacgatcatgcctggctaatttttaatttttttagagatgggatctcgctatgttgcccaggctggtctcaaactcctggcccggagcagtcatcctgcctcagcctcccaaagcgctaggattacaggcccaagccactgtgcctggtcaggtgtctttgagagtggtgctatcccactgaactggtgagaaagttgagtagaaccaaagaaagaaaacttgatagaagcaagaattatgattgcg

SEQ ID NO: 210 - protein, 53 aa, Homo sapiens [sequence omitted]

SEQ ID NO: 211 - DNA, 411 bp, Homo sapiens
gagaagagacagaagggttactagctaagtttttgggaagtcaaaaattatacaaaaatttctgactgtgcaggggtcagtgagtctaaccgctgcactattgaagggtcaactgtacttgaaaaaagtcacttgtagcaggaagaatagcatgggaaaagattcaagaccacatagttaagtctcagatttctagctggtgcatacatcaactgcctcttctcaacatacaccctgcaaatcctttattccagatcctttttgtgaaaaatcaaactattattccctatgataagatctaaaagaactgacagatgttactctatactaacaattccattttcacaaagaagcatctctgagttagtaaaaaaaaaaaaaaaaaaaaaagaggaaaagtcgtatcgatgt

SEQ ID NO: 212 - protein, 41 aa, Homo sapiens
MIRSKRTDRCYSILTIPFSQRSISELVKKKKKKKEEKSYRC

SEQ ID NO: 213 - DNA, 161 bp, Homo sapiens
gcctactactactatacggctgcgagatgacgacagaagggctcattattccatatttttccaccaccttcttcccaaaggcacgtgtacctgcctgacctcctctgcctgagaagggctcagaacaaagtaaaaaaaaaaaaaaaaaaaagtcgtatcga

SEQ ID NO: 214 - protein, 36 aa, Homo sapiens
PTTTIRLRDDDRRAHYSIFFHHLLPKGTCTCLTSSA

SEQ ID NO: 215 - DNA, 321 bp, Homo sapiens
tatacggctgcgagaagacgacagaaggggttaaggagcaaggaattcagtaggaggcagcagcagactagctcttaaagcgtttgagggaatggctaattaaaggacttgcttgataggaaagttataaactgatgaatgctgataaaaagctatagatgggccgggtgcagtggctcacgccctgtaatcccagcactttgggaggctgaggcaggtggatcacctgaggttgggagttcaagactagcctggccaacatggcgaaacactgtgtcttctaaaaaaaaaaaaaaacaaaagaaaaaaaaagtcgtatcg

SEQ ID NO: 216 - protein, 61 aa, Homo sapiens [sequence omitted]

SEQ ID NO: 217 - DNA, 284 bp, Homo sapiens
catcatcatcatgatcgctcgacatcgatacgacttttttttttttttttttttaggtaagagaaaatctgaaaatgagacgtttcattcacctccatatctttactgctcagacacattggctgatatctgcttggctttacttccagtgctttctctaattgcagaggcatgtgaaggccgtaatctttagaagagccttcaaagccttgcatggtctggccctgcctgtctttccagcctcacccttgtgaccgtctccccttctgtcgtcttctcgcagc

SEQ ID NO: 218 - protein, 60 aa, Homo sapiens [sequence omitted]

SEQ ID NO: 219 - DNA, 265 bp, Homo sapiens
gagaagacgacagaaggggtctccaggcctcagactgtggagctttcacgctcgcacaacctcacagactgtgcctgatttatggatgacattttaattaagatgttacatctaactttaaagaaaagtagttatttagaaccattgtgtatgtttaaagcacggtacaaatatagcacatttcccaaaccaaagaacagtgcattgcaggaaaaaatagcagctcgcaaaaaaaaaaaaaaaaaaaaaaaaaaagtcgtatcga

SEQ ID NO: 220 - protein, 60 aa, Homo sapiens [sequence omitted]

SEQ ID NO: 221 - DNA, 291 bp, Homo sapiens
catcatcatcatcatgatcgctcgacatcgatacgactttttttttttttttttttaaataaagacagggtttcaccctgttggccaggatggtcttgaactcctgacttcaggtcgtcctcctgccttggcctcccaaagtgctgggattacagacgtgagccaccgcacccagcctgtttagtgtttgatgcatagtattttttagatggctattgaatgcatgtaaatgcgtacataatcttttttaatctcgttcttccatctgcccttctgtcgtcttctcgcagc

SEQ ID NO: 222 - protein, 32 aa, Homo sapiens
HHHHHDRSTSIRLFFFFFLNKDRVSPCWPGWS

SEQ ID NO: 223 - DNA, 216 bp, Homo sapiens
gaaagacgacagaagggaagagtggtctgggaaggcctctgtaaggaagtagcatttaaatagagtgaaaaactcagtaacctagagcagcagcgtccaatagaaatacaatgtgaggccaggcgcggtggctcacatctgtaatctcagcactttgggagggcgacaagagtgaaactggctctcaaaaaaaaaaaaaaaaaaaagtcgtatcga

SEQ ID NO: 224 - protein, 20 aa, Homo sapiens
ERRQKGRVVWEGLCKEVAFK

SEQ ID NO: 225 - DNA, 235 bp, Homo sapiens
cgagaagacgacagaagggagcaagtatttgaaaaacattgcctggtacacagtacctctcaaactgcaagaacgtaagaaatttttgttcactataaaattacagacctgtacaaactttttctaaaaagtaatgtattctcttaaaacaatggcttttctcttttgcaaaagcacagctactttttcctggcaaaaaaaaaaaaaaaaaaaaaaaaaaaagtcgtatcgatgt

SEQ ID NO: 226 - protein, 34 aa, Homo sapiens
MYSLKTMAFLFCKSTATFSWQKKKKKKKKKSYRC

SEQ ID NO: 227 - DNA, 515 bp, Homo sapiens
  misc_feature (497)..(497): n = unknown
gcggccgcggctgggaccccagctccggccccggccccggctgcgagctgcgctgccgtcccggcgcctctttagcaggggagctgcacagcagctgccatgttgctacaaactgcatcctgggaggcatgtccctctcaggccgtttaaagagaaacactccgaggctcgtcggaggctgccggaacccagacagctccatctacagccggtaggagcgaacagtgtcgagcgagccgcccggcggcgacggacacgccctgagcccgggccagcccgtcgtggagcccgggccgaaccgccggggcctcccaccctccaggaccctccggcctctcacctggggtcctcgcctgcccaggcaccctcgggcgaggccgggaggcgcgcgggcggaggcgcagtcggagcgcgcagcccaggcgacgtgccggggtctggaggcggcttgattggctccgacagccttcctcccgccgatcccctgcgcctctcanacccagaacccgggtcgt

SEQ ID NO: 228 - protein, 168 aa, Homo sapiens
  MISC_FEATURE (163)..(163): X = unknown
LGPQLRPRPRLRAALPSRRLFSRGAAQQLPCCYKLHPGRHVPLRPFKEKHSEARRRLPEPRQLHLQPVGANSVERAARRRRTRPEPGPARRGARAEPPGPPTLQDPPASHLGSSPAQAPSGEAGRRAGGGAVGARSPGDVPGSGGGLIGSDSLPPADPLRLSXPEPGS

SEQ ID NO: 229 - DNA, 311 bp, Homo sapiens
taagaaaaattttgaatatttttattgaattccaatatagttactctgaaaaaacaaattagacagatatcctaaattgaaaatcatgatgtacaaaacccactgtcattaccaataaaaagtttaaaataaagtgtcaagattgatttttacaagaacagcattcatatatcaaaaacctctctcttttttataccaaatgattaaggtatactgaaaattacacacctcaagaaaatatatcagtagatgaaatattatcactgaagatagtcacataaggcatgattgttttgggaatttaaataaaa

SEQ ID NO: 230 - DNA, 248 bp, Homo sapiens
gagaagacgacagaagggttatttggtgctggagctctccaaattaagaatgggcagtgacaaactttgaacaggtaacaaacaataaattcaaagtatatttaggattaaacagtcaatttctaaatgggagtctatcatgtctcccctttgcaatactggcttcccaacaggaattctatacttgtccagtccaccataatgggtattctcattaaaaaaaaaaaaaaaaaaaaagaaaaaagtcg

SEQ ID NO: 231 - protein, 40 aa, Homo sapiens [sequence omitted]

SEQ ID NO: 232 - DNA, 406 bp, Homo sapiens
attttctatggttttattgcctaaataataagtattattagttatttattgttacataacaaattactcccaaacttagcacttacatcaacatgcgttgctatttcagtttctccaggttaggaatccaggtacagattagctggctgagggtctctctcaagggtgcagttagaatagtggtcagggcagcagagctacaatcttctcgagtttcagctgggcaggatccgcttccaggctcactcagtggttgttggcaggattcagttccttgtgggttgttggattgagggcctcagttcctcaatggctagtggctgggggccccttgagtttcctcctacatgggcgtctatagagcagctcacagcattgaagctagcttcattaaacaagctttcac

SEQ ID NO: 233 - protein, 66 aa, Homo sapiens
MRCYFSFSRLGIQVQISWLRVSLKGAVRIVVRAAELQSSRVSAGQDPLPGSLSGCWQDSVPCGLLD

SEQ ID NO: 234 - DNA, 589 bp, Homo sapiens
  misc_feature (576)..(576): n = unknown
  misc_feature (583)..(583): n = unknown
catttaaacacatttctttgagattgagcttttgggaataaccacctttccaccattacaataagagataatttcacgtttagtctaatgtacaaattggatttttaaaaaatgagctctatctgtgaagcccttattcctatagaatgtgtctttttgagtttattacttattacagactctaaaaacaacattgctgctgattttcaagtaagctgcctcttctacatagcaaataggtacacttcacttttccctgatttttcttagggcgtgctattgatttttattgttgtctgacaaaataatttatcaaacaaaagggagaaagactaaaaaatgtatttttccacttttctgtatcatgcataatcagcaacaaccaatacaatatttggcaagagtgaacaaaaataaatttactcttgctccttagaaatacaagggttcctttttagttacacttctttcttttactttgtgtcattcagtttagagcaattaaatcttcttttctccctgcgtttccagctcagcgcccattacgttctgtctctttccttagtgcattattgnatactgngcatag

SEQ ID NO: 235 - protein, 52 aa, Homo sapiens [sequence omitted]

SEQ ID NO: 236 - DNA, 657 bp, Homo sapiens
ggcagcccggagacagcctccctggctgggaatgaacgcagggcagagctcggctccgggcttcctccccagggactcacaggacgctgtgcagccccaccccccaacccaggcccggctttctgggactcacaagctatggtcaggagcgagacgccgaccatggggaaaaacagattctgtctagacccggccgggagctttcccgagagggctccgagacggacggcagtcgatgctacttagggtggacggaaggacggcggggtttggaagctgggcccagaagagtgggtttgcctgtgtcgttgtgggttctctgatggggacacagaactgtggggtcccgggcagtaactcgagcccgcggacagacaggcatgtgtgggggctgcggcaccaggctgggcagcatctcaggaagcaagtgagtacctgtgcttggttccaaggcggccatgaacttacctcactgttcaggaaacagtagaggacggccaccaccaggccctgcaatgagaagagatggtcaggcaggacccgcgctcgggggagggcggccgcctccgcacacctacctggaacgacccgaggcacagctcaaacagtatctggtatctggaggagatgctgatgggaaacacggcaaacaccatg

SEQ ID NO: 237 - protein, 438 aa, Homo sapiens
MRTLLPPALLTCWLLAPVNSIHPECRFHLEIQEEETKCTELLRSQTEKHKACSGVWDNITCWRPANVGETVTVPCPKVFSNFYSKAGNISKNCTSDGWSETFPDFVDACGYSDPEDESKITFYILVKAIYTLGYSVSLMSLATGSIILCLFRKLHCTRNYIHLNLFLSFILRAISVLVKDDVLYSSSGTLHCPDQPSSWVGCKLSLVFLQYCIMANFFWLLVEGLYLHTLLVAMLPPRRCFLAYLLIGWGLPTVCIGAWTAARLYLEDTGCWDTNDHSVPWWVIRIPILISIIVNFVLFISIIRILLQKLTSPDVGGNDQSQYKRLAKSTLLLIPLFGVHYMVFAVFPISISSKYQILFELCLGSFQGLVVAVLYCFLNSEVQCELKRKWRSRCPTPSASRDYRVCGSSFSHNGSEGALQFHRASRAQSFLQTETSVI

SEQ ID NO: 238 - DNA, 1750 bp, Homo sapiens
gcggtcttatataagccagatccgcaggggagtccgcagaagggttaaacaggtctttgggcttcggcgacctcgcccgcggcagaaaccggtaagaagacagtgggctgcgcgtctcattttcagccttgcccggactctcccaaagccggcgcccagtagtggctccagagcccacaggtggcccccggcagtctctggggcgcatggagcggcgttaatagggctggcggcgcaggccagtagccgctccaacatgaacctcgtgggcagctacgcacaccatcaccaccatcaccacccgcaccctgcgcaccccatgctccacgaacccttcctcttcggtccggcctcgcgctgtcatcaggaaaggccctacttccagagctggctgctgagcccggctgacgctgccccggacttccctgcgggcgggccgccgcccgcggccgctgcagccgccaccgcctatggtcctgacgccaggcctgggcagagccccgggcggctggaggcgcttggcggccgtcttggccggcggaaaggctcaggacccaagaaggagcggagacgcactgagagcattaacagcgcattcgcggagttgcgcgagtgcatccccaacgtgccggccgacaccaagctctccaagatcaagactctgcgcctagccaccagctacatcgcctacctgatggacgtgctggccaaggatgcacagtctggcgatcccgaggccttcaaggctgaactcaagaaggcggatggcggccgtgagagcaagcggaaaagggagctgcagcagcacgaaggttttcctcctgccctgggcccagtcgagaagaggattaaaggacgcaccggctggccgcagcaagtctgggcgctggagttaaaccagtgagccgaggcccgcgccgaggacctggccaggccagccactcctgaagccccgggaggagaggaaggcagcggcgaacgccaggctctgggctccggcgactggtgctacgcatcccgcggagcttctgctgagcgccggcaggtcgtcggctgcaaccacacacttggatcgcacgtgcaatgtcctttgattttttttaatacattaagagaaagagaaatatatatatatccacccccagcccaaccgagggcggcccttggcggcaacatgcaagaaggagggactgtcgaacccaagggctcaaagacgcactcttccacccttttggagcgaatttagaacctcagccctatctccatttccctatctggctctttctctcttgtccctccatatgatccgccccgacgccgtcttctctaattaaaatgcaataaggaatcaattcttttcttgcctgagaaagagaaccagacgcaggaagatgaaaggctgccctttgttcttcgaatcgtggtggttttattttatttttctttttgtcgctgcacttcctgtttagttccaagggaaacactttctctctttctctgtctctctcttttcttccttcttttccttcctttttgtttctatctaaataaaagctttccctgtgttggaaagtttttatgtatttaaactacctaccatgcctgttgtgctcaggtgtttgttcatcctgccatccccaacccttttctacctcaagtctgtgtgaccactcacagcccccctcccttcgccaaagcagtgtctatgctcttgattaataaaacattttctgaaatcaaaaaaaaaaaa

SEQ ID NO: 239 - protein, 215 aa, Homo sapiens
MNLVGSYAHHHHHHHPHPAHPMLHEPFLFGPASRCHQERPYFQSWLLSPADAAPDFPAGGPPPAAAAAATAYGPDARPGQSPGRLEALGGRLGRRKGSGPKKERRRTESINSAFAELRECIPNVPADTKLSKIKTLRLATSYIAYLMDVLAKDAQSGDPEAFKAELKKADGGRESKRKRELQQHEGFPPALGPVEKRIKGRTGWPQQVWALELNQ

SEQ ID NO: 240 - DNA, 489 bp, Homo sapiens
tttccctactcattagctggccccttttatgaccaatgactcataaggcaagatgtgtggtggcatcttcggacaggcggcaggctttaatagggcagcctgggttggtggaggcaagcaaagctaattggcatgcgtgggaatcaaaccccaggccctgggctcattagcccatggtcaaaacaactgagccagaggaggtaataatttgcccaagaatatcagtagttcctttattagaagaaaatggctgatatggaagttggggaatctgaattgccagagaatcttgggaagagtaataagctcttagtctcaacaaaaagtgttttttcatctcagcgcgtaaagggtgctatatgggaacaaagaagtattttaaaattataactactcattctttctttagccttagttaatttgagcagaagccacaacaagcaaaccacaataaatttagaattggcagaaatccacattaactcctct

SEQ ID NO: 241 - protein, 47 aa, Homo sapiens [sequence omitted]

SEQ ID NO: 242 - DNA, 2487 bp, Homo sapiens
agtttctcttcgttttgtttttcttttatttttcttgctcctctttctacacactgaagttgctgttgttttacatttaccttttatttatttgtagtttttgaggcaggttggagtgtaagaatgcaatctcggcttacagccgcctcgactttccaggactccctcaggtgatcttcctatctcagccttccaagtggctgagactacaggaatcacttaattctgtgatgtcgaagctgaagtgagccgtgatgatgccttgccctccagtctgagtgtttcagaaggtggagtttcgctcttattgcccaggctggagttcagtggcgtgacctcagctcaccgcaacctctgccgcctgtgttcaagagattttccagtcttcaccctttcgagtagctgaaaccacaggcaaacacctccaggcctggctaattttttttttttcatagagactaggtagctccataatggtcaggctggtctagaacacccgacctgaggcgtaccacccaacttgaccacccaaagtgctgagattaaaggcgtgagctccgcgtctggccataacatcttatcctatagaagcccagagaggttaggcgacatctcacgtgtcgaggtgatctcgaacttttaggctccagagatcctcccgcatcggcctcccggagtgctgtgatgacacgcgtgggcacgacggagtttcactcttgtcgcccagggtggagtacgatggcggctctcggctcaccgcaccctccgcctcccaggttcaagtgattctcctgcctcagccttcccgagtagctggaatgacagagatgagccatcgtgcccggctaatttttctatttttagtacagatggggtttctccatcttggtcatgctggtcttcaacttccgaccgttggagaatcttaactttcttggtggtggttgttttcctttttctttttttttctttttttttctttccttctcctcccccccccaccccctttgtcgtcgtcctcctcctcctcctcctcctcctcctcctcctcctcctcctcctcctcctcctctttcatttctttcagctgggctctcctacttgtgttgctctgttgctcacgctggtctcaaactcctggccttgacgcttctcccgtcacatccgccgtctggttgttgaaatgagcatctctcgtaaaatggaaaagatgaaagaaataaacacgaagacggaaagcacggtgtgaacgtttctcttgccgtctcccggggtgtaccttggacccggaaacacggagggagcttggctgagtgggttttcggtgccgaaacctcccgagggcctccttccctctcccccttgtccccgcttctcccccagccgaggctcccaccgccgccctggcattttccataggagaggtatgggagaggactgacacgccttccagatctatatcctgccggacgtctctggctcggcgtgccccaccggctacctgctaccttccagggagctctgaggcggatgcgacccccacccccccgtcacgtcccgctaccctcccccggctggcctttgccgggcgaccccaggggaaccgcgttgatgctgccttcggatcctccggcgaagacttccaccggatgccccgggtgggccggttgggatcagactggaccaccccggaccgtgctgttcttggggcacacagatgagacgcacgagagggagaaacagctcaatagataccgctgaccttcatttgtggaatcctcagtcatcgacacacaagacagacggagtctcgctctgggcggggcgaggcgaggcgaggcacagcgcatcgctttggaagccgcggcaacgcctttcaaagccccattcgtatgcacagagccttattcccttcctggagttggagctgatgccttccgtagccttgggcttctctccattcggaagctttgacaggcgcaaccccacccagaggctggctgcggctgaggattagggggctgcggtgcggtggcgctctctcggctcactgagacctctgcttcccgggttccagtgattcttcttcggtagctgggattacaggcgcacaccatgacggccggctcatattcctattttcagtagagacggggtttctccacgttggccacgctggtctcgaactcctgacctcaaatgatccgccttcctgggcctcccaaagtgctggaaacgacaggcctgagccgccgggatttcagcctttaaaagcgcgggccctgccacctttcgctgtggcccttacgctcagaatgacgtgtcctctctgccgtaggttgactccttgagtcccctaggccattgcactgtagcctgggcagcaagagccaaactccgtccccccacctccccgcgcacataataactaactaacaaactaactaactaactaaactaactaaataaataaaatctctacacgtc

SEQ ID NO: 243 - protein, 99 aa, Homo sapiens
MRRTRGRNSSIDTADLHLWNPQSSTHKTDGVSLWAGRGEARHSASLWKPRQRLSKPHSYAQSLIPFLELELMPSVALGFSPFGSFDRRNPTQRLAAAED

SEQ ID NO: 244 - DNA, 2114 bp, Homo sapiens
aggaattccggtggccggccactcccgtctgctgtgacgcgcggacagagagctaccggtggacccacggtgcctccctccctgggatctacacagaccatggccttgcaacggctcgacccctgttggtcctgtggggaccgccctggcagcctcctgttcctgctcttcagcctcggatgggtgcatcccgcgaggaccctggctggagagacagggacggagtctgcccccctggggggagtcctgacaaccccccataacatttccagcctctcccctcgccaactccttggcttcccgtgtgcggaggtgtccggcctgagcacggagcgtgtccgggagctggctgtggccttggcacagaagaatgtcaagctctcaacagagcagctgcgctgtctggctcaccggctctctgagccccccgaggacctggacgccctcccattggacctgctgctattcctcaacccagatgcgttctcggggccccaggcctgcacccgtttcttctcccgcatcacgaaggccaatgtggacctgctcccgaggggggctcccgagcgacagcggctgctgcctgcggctctggcctgctggggtgtgcgggggtctctgctgagcgaggctgatgtgcgggctctgggaggcctggcttgcgacctgcctgggcgctttgtggccgagtcggccgaagtgctgctaccccggctggtgagctgcccgggacccctggaccaggaccagcaggaggcagccagggcggctctgcagggcgggggacccccctacggccccccgtcgacatggtctgtctccacgatggacgctctgcggggcctgctgcccgtgctgggccagcccatcatccgcagcatcccgcagggcatcgtggccgcgtggcggcaacgctcctctcgggacccatcctggcggcagcctgaacggaccatcctccggccgcggttccggcgggaagtggagaagacagcctgtccttcaggcaagaaggcccgcgagatagacgagagcctcatcttctacaagaagtgggagctggaagcctgcgtggatgcggccctgctggccacccagatggaccgcgtgaacgccatccccttcacctacgagcagctggacgtcctaaagcataaactggatgagctctacccacaaggttaccccgagtctgtgatccagcacctgggctacctcttcctcaagatgagccctgaggacattcgcaagtggaatgtgacgtccctggagaccctgaaggctttgcttgaagtcgacaaagggcacgaaatgagtcctcaggctcctcggcggcccctcccacaggtggccaccctgatcgaccgctttgtgaagggaaggggccagctagacaaagacaccctagacaccctgaccgccttctaccctgggtacctgtgctccctcagccccgaggagctgagctccgtgccccccagcagcatctgggcggtcaggccccaggacctggacacgtgtgacccaaggcagctggacgtcctctatcccaaggcccgccttgctttccagaacatgaacgggtccgaatacttcgtgaagatccagtccttcctgggtggggcccccacggaggatttgaaggcgctcagtcagcagaatgtgagcatggacttggccacgttcatgaagctgcggacggatgcggtgctgccgttgactgtggctgaggtgcagaaacttctgggaccccacgtggagggcctgaaggcggaggagcggcaccgcccggtgcgggactggatcctacggcagcggcaggacgacctggacacgctggggctggggctacagggcggcatccccaacggctacctggtcctagacctcagcgtgcaagagaccctctcggggacgccctgcctcctaggacctggacctgttctcaccgtcctggcactgctcctagcctccaccctggcctgagggccccactcccttgctggccccagccctgctggggatccccgcctggccaggagcaggcacgggtgatccccgttccaccccaagagaactcgcgctcagtaaacgggaacatgccccctgcagac

SEQ ID NO: 245 - protein, 628 aa, Homo sapiens
MALQRLDPCWSCGDRPGSLLFLLFSLGWVHPARTLAGETGTESAPLGGVLTTPHNISSLSPRQLLGFPCAEVSGLSTERVRELAVALAQKNVKLSTEQLRCLAHRLSEPPEDLDALPLDLLLFLNPDAFSGPQACTRFFSRITKANVDLLPRGAPERQRLLPAALACWGVRGSLLSEADVRALGGLACDLPGRFVAESAEVLLPRLVSCPGPLDQDQQEAARAALQGGGPPYGPPSTWSVSTMDALRGLLPVLGQPIIRSIPQGIVAAWRQRSSRDPSWRQPERTILRPRFRREVEKTACPSGKKAREIDESLIFYKKWELEACVDAALLATQMDRVNAIPFTYEQLDVLKHKLDELYPQGYPESVIQHLGYLFLKMSPEDIRKWNVTSLETLKALLEVDKGHEMSPQAPRRPLPQVATLIDRFVKGRGQLDKDTLDTLTAFYPGYLCSLSPEELSSVPPSSIWAVRPQDLDTCDPRQLDVLYPKARLAFQNMNGSEYFVKIQSFLGGAPTEDLKALSQQNVSMDLATFMKLRTDAVLPLTVAEVQKLLGPHVEGLKAEERHRPVRDWILRQRQDDLDTLGLGLQGGIPNGYLVLDLSVQETLSGTPCLLGPGPVLTVLALLLASTLA

SEQ ID NO: 246 - DNA, 537 bp, Homo sapiens
tttatttcattattcattccatttattttttattcttctaatttttctttctcccaagtccatattttacatccatccatctaatcatatttattgagtcattattaagcacaaagttctatggatggcacgggaaaacccagtgatcaatgcgatggagtccttcccacaggagcctacaatctcaagcaaagttcagaattaattagtggttaatctttactgacttcataaaacgtatcaagcacagtgcagagcacttgacactcattatcacatttaattttaagctacctatgaggtggacgttcttttacagaagaggaatctgtagctcaataaagctgagtactttatctaggctggatccaaacccaggcagcctgactcccaaaccctgcatgcatgtctacatcacaccccaggcccctcagctctgtgagccctcctgacttcgattcctcctctgcttgcactcttttaacattagtcatcttaacaagaactctaatctatacaattcaagacgttacactg

SEQ ID NO: 247 - protein, 51 aa, Homo sapiens
MRWTFFYRRGICSSIKLSTLSRLDPNPGSLTPKPCMHVYITPQAPQLCEPS

SEQ ID NO: 248 - DNA, 414 bp, Homo sapiens
ttttttttttggggacaggaatttgacttttattctttcccatattcccagtgcctgacagatggaaggtacctaatagatatttgtagaatggctgaatgagggtgcaagacaccataatgccttccaattatctttcttttgccttgctattttcattttaaagtggcagatggatggggacacagtaggaattatctagattatggccatcagccactttcaataatcttttggttcttgttctaattcattaaattgctgtgcagccaacttgaattacacagcaagacacagcaaagagaatcagaagccaattcttctaacacgtatctcttcttaaacaaggaaattccacacagcaccatttcttaggcaaggcagataacccctacatatttggtttttctttaa

SEQ ID NO: 249 - protein, 21 aa, Homo sapiens
MRVQDTIMPSNYLSFALLFSF

SEQ ID NO: 250 - DNA, 1584 bp, Homo sapiens
actctgggcgaggccgcccctatcccagccgcaccggtccttcccggcacacgcgaggctcccatggctctggcggtggccccgtgggggcgacagtgggaagaggcccgcgccctgggccgggcagtcaggatgctgcagcgcctagaagagcaatgcgtcgacccccggctgtccgtgagtcccccttcgctgcgggacctgctgccccgcacagcgcagctgcttcgagaggtggcccattctcggcgggcggccggcggaggcggccccgggggtcccggcggctctggggactttctactcatctacctggccaatctggaggccaagagcaggcaggtggccgcgctgctgcctccccggggccgaaggagtgccaacgacgagctcttccgggcgggctccagactcaggcgacagctggccaagctggccatcatcttcagccacatgcacgcagagctgcacgcactcttccccgggggaaagtactgtggacacatgtaccagctcaccaaggcccccgcccacaccttctggagggaaagttgcggagcccggtgtgtgctgccctgggctgagtttgagtccctcctgggcacctgccaccctgtggaaccaggctgcacagccctggccttgcgcaccaccattgacctcacctgcagcgggcacgtgtccatcttcgagttcgacgtcttcaccaggctctttcagccatggccaacactcctcaagaactggcagctcctggcagtcaaccacccaggctacatggccttcctcacctatgatgaggtccaagagcgtctgcaggcctgcagggacaagccaggcagttacatcttccggcccagctgtactcgcctggggcagtgggccatcggctatgtgagctcagatggcagcatcctgcagaccatccctgccaacaaacccctgtcccaggtgctcctggagggacagaaggacggcttctacctctacccagatggaaagacccacaacccagacctgactgagctcggccaggcagaaccccagcagcgcatccacgtgtcagaggagcagctgcagctctactgggccatggactccacatttgagctctgcaagatctgtgctgagagcaacaaggatgtgaagattgagccgtgcgggcacctgctctgcagctgctgcctggctgcctggcagcactcggacagccagacctgccccttctgccgctgcgagatcaagggctgggaggccgtgagtatctaccagttctacggtcaggctactgctgaggactcagggaacagcagtgaccaggaaggcagggagttggagctggggcaggtgcccctttcggctcctccattgcccccacggccagatctgccccccaggaagcccagaaatgcccagccgaaagtgagactcctaaaggggaactcccctccagctgcgctgggaccccaggaccctgccccggcctgaaggccagggcacccagatgtgctgctcaagggagccccaagggctggaagggggttgtgaaaccgaaataaactgccaagcctggtctgtccacca

SEQ ID NO: 251 - protein, 474 aa, Homo sapiens [sequence omitted]

SEQ ID NO: 252 - DNA, 454 bp, Homo sapiens
tttgtttccagaggcaagtttattcatgcaccttttaacgaatcaatgttgttctggttgaatcatgggcatagagagtcagcaacaacaattcggtaggtgttgtgccaacgttggggcactttactgagaggcaccgtgggttccagagaaagtcttctagctggggtcctcctgaggacaaccctgctcccatttggcctggatttggggtcccttcctcctccatggtccatttaggccatgttgtgtgtcagtacgacctacacgtgaactccagaggaaaggcctgcccgggatgttgctgttgttctgatacagaaacaattggatgcccttaaacgcacatgccttcccatgtaatgtcttggcaaagtggaaatgagcactcagaattgtcgctggcaggagtgctgctgggttcgcgtttctttatgcaatgtgccatcagtca

SEQ ID NO: 253 - protein, 37 aa, Homo sapiens
MVHLGHVVCQYDLHVNSRGKACPGCCCCSDTETIGCP

SEQ ID NO: 254 - DNA, 588 bp, Homo sapiens
  misc_feature (405)..(405): n = unknown
  misc_feature (564)..(564): n = unknown
ttttttttttttttttttttttttttttttttttttttttttttttttttttttttccccattaacctttttaagggggcccaaaaattcggggccaaatttggggccagggggttcccataaaaaagcccggttttaaaaacctaaaacctaaaaccggccccccccaaaaaaaaaacccaagggggcccccaaaacattccccttcccttgggaggggttaccgaggcttggttatcataacccagccttttcccccaaaactaaaggggccaatggaaacaaacggtttggaacccgtcctccccccccggataaaaagggggggggggggttttggggaaaaaattcattaacccttctgaccttttggggcaaactgggggccctggccagccccagaanccttttgggccacggtttggaggaccccacccgaaacggttggtttaatataccgaacaagaaagcgccccaaggggggatggttggagaagctctcaacacacagggcctggccaggacccatatcacaaggggagtattccccagcttaaaaaattnggggcctttttccgctttttacca

SEQ ID NO: 255 - protein, 75 aa, Homo sapiens
  MISC_FEATURE (15)..(15): X = unknown
  MISC_FEATURE (68)..(68): X = unknown
LTFWGKLGALASPRXLLGHGLEDPTRNGWFNIPNKKAPQGGMVGEALNTQGLARTHITRGVFPSLKNXGPFSAFY

SEQ ID NO: 256 - DNA, 996 bp, Homo sapiens
ggcacgaggctcagtggtgaaggctgtgcggacactgggggcccgccaggggtttggccccttactcaacccaaccacggtcctctccggcgcaggccgatttgaggacctagactccttgatgctgacggcctgagggggctcccgggtgccggatatctgacacaggccagggaggctcccctgggagacctggcaggcctggaggtgtgagtcggctctgagcagctgctctgggagagccagtccacggagccaaagctggagggcagctgccggccacaagttggggaggaggagagacgcaaggccgtcagatgcttgtcctggaaaccaaccatgagctgtgatgaaatccaggcaactgagttgtgtttcagcccaaagcagcaaatggaatccagcttcaggaccatcatctgacataggggaagaagacttacatagaaggcctaaccagcacccaagatcatgctcataggtggaggagacttgctttgtctcagatgagactttggactgtggacttttgagttaatgctgaaatgagttgagactttggggaactgttgggaaggcatgattggttttaaatatgaatatatgagatttgggagggggtcaggggtggaatgatatggtttggctctgtgtccccacccaaatctcatcttgtagctcccataatcctcccatgttgtgggagggacccagtgggagatgattgaatcatgagggcgggtctttctcatgctgttcatgatcccattcatgtgagaaagacccatgtgatcatgaatgggtctcacaagatctgatggtgttaaaaatgggagtttctctgcacaagctctctgcctgctgccattcacaaaggatgtgacttgcttctccttgccttctgctatgattgtgaggcctccctagccatgtggaactgtgagtccaattaaacctctttcttttgtaaattgaaaaaaaaaaaaaaaaaaaaaa

SEQ ID NO: 257 - protein, 42 aa, Homo sapiens
MGLTRSDGVKNGSFSAQALCLLPFTKDVTCFSLPSAMIVRPP

SEQ ID NO: 258 - DNA, 560 bp, Homo sapiens
  misc_feature (537)..(537): n = unknown
tgttaccattctgttgtatttttcttgtgatttttattttgaatcaaatattgtaaattgtgtataaatgaagatgctgaatagttctgtttccacttggcatttcaagtctgatatcaggtgtctgtacagggttttgatttctttcccttgtataactacacaacaatcctacagtgtaacatatggaatcattttgaatagacttgtgtgctataagctttcagcaggtcctctgtctctagaataagcatgttgtttattttcagataatcagaaataagtgtgctgacaagctggacacaatctgggtgtgcccagcttacctttctttctgatgtttaaattgaaggctgcagccaatggaatatgttcagctggttttccttggcttcctagattaaaaaaaaataataaagcatagttctttattaactttaggatattgttcataaaataaataaaggcccctgcactaacatgacaacatgcctcatggtcaccctctctatatgtacttactcattaaagtgtatnttatttccttatgtggaaagcac

SEQ ID NO: 259 - protein, 60 aa, Homo sapiens [sequence omitted]

SEQ ID NO: 260 - DNA, 4834 bp, Homo sapiens
ttctttactaaccctacaaaaaacctagtgtctataactaaagattctgaactgcccacctgcagctgtcttgatcgagttatacaaaaagacaaaggcccatattatacacaccttggggcaggaccaagtgttgctgctgtcagggaaatcatggagaataggtatggtcaaaaaggaaacgcaataaggatagaaatagtagtgtacaccggtaaagaagggaaaagctctcatgggtgtccaattgctaagtgggttttaagaagaagcagtgatgaagaaaaagttctttgtttggtccggcagcgtacaggccaccactgtccaactgctgtgatggtggtgctcatcatggtgtgggatggcatccctcttccaatggccgaccggctatacacagagctcacagagaatctaaagtcatacaatgggcaccctaccgacagaagatgcaccctcaatgaaaatcgtacctgtacatgtcaaggaattgatccagagacttgtggagcttcattctcttttggctgttcatggagtatgtactttaatggctgtaagtttggtagaagcccaagccccagaagatttagaattgatccaagctctcccttacatgaaaaaaaccttgaagataacttacagagtttggctacacgattagctccaatttataagcagtatgctccagtagcttaccaaaatcaggtggaatatgaaaatgttgcccgagaatgtcggcttggcagcaaggaaggtcgtcccttctctggggtcactgcttgcctggacttctgtgctcatccccacagggacattcacaacatgaataatggaagcactgtggtttgtaccttaactcgagaagataaccgctctttgggtgttattcctcaagatgagcagctccatgtgctacctctttataagctttcagacacagatgagtttggctccaaggaaggaatggaagccaagatcaaatctggggccatcgaggtcctggcaccccgccgcaaaaaaagaacgtgtttcactcagcctgttccccgttctggaaagaagagggctgcgatgatgacagaggttcttgcacataagataagggcagtggaaaagaaacctattccccgaatcaagcggaagaataactcaacaacaacaaacaacagtaagccttcgtcactgccaaccttagggagtaacactgagaccgtgcaacctgaagtaaaaagtgaaaccgaaccccattttatcttaaaaagttcagacaacactaaaacttattcgctgatgccatccgctcctcacccagtgaaagaggcatctccaggcttctcctggtccccgaagactgcttcagccacaccagctccactgaagaatgacgcaacagcctcatgcgggttttcagaaagaagcagcactccccactgtacgatgccttcgggaagactcagtggtgccaatgcagctgctgctgatggccctggcatttcacagcttggcgaagtggctcctctccccaccctgtctgctcctgtgatggagcccctcattaattctgagccttccactggtgtgactgagccgctaacgcctcatcagccaaaccaccagccctccttcctcacctctcctcaagaccttgcctcttctccaatggaagaagatgagcagcattctgaagcagatgagcctccatcagacgaacccctatctgatgaccccctgtcacctgctgaggagaaattgccccacattgatgagtattggtcagacagtgagcacatctttttggatgcaaatattggtggggtggccatcgcacctgctcacggctcggttttgattgagtgtgcccggcgagagctgcacgctaccactcctgttgagcaccccaaccgtaatcatccaacccgcctctcccttgtcttttaccagcacaaaaacctaaataagccccaacatggttttgaactaaacaagattaagtttgaggctaaagaagctaagaataagaaaatgaaggcctcagagcaaaaagaccaggcagctaatgaaggtccagaacagtcctctgaagtaaatgaattgaaccaaattccttctcataaagcattaacattaacccatgacaatgttgtcaccgtgtccccttatgctctcacacacgttgcggggccctataaccattgggtctgaaggcttttctccccctcttaatgcctttgctagtgcagtgtattttttcaaggtgctgttaaaagaaagtcatgttgtcgtttactatcttcatctcacccatttcaagtctgaggtaaaaaaataataatgataacaaaacggggtgggtattcttaactgtgactatattttgacaattggtagaaggtgcacattttaagcaaaaataaaagttttatagttttaaatacataaagaaatgtttcagttaggcattaaccttgatagaatcactcagtttggtgctttaaattaagtctgtttactatgaaacaagagtcatttttagaggattttaacaggttcatgttctatgatgtaaaatcaagacacacagtgttaactctacacagcttctggtgcttaaccacatccacacagttaaaaataagctgaattattatttcatggtgccattgttccaacatcttccaatcattgctagaaaattggcatattcctttgaaataaacttatgaaatgttttctctcttaaaatatttctcctgtgtaaaataaatcattgttgttagtaatggttggaggctgttcataaattgtaaatatatattttaaaagcactttctatttttaaaagtaacttgaaataatatagtataagaatcctattgtctattgtttgtgcatatttgcatacaagagaaatcatttatccttgctgtgtagagttccatcttgttaactgcagtatgtattctaatcatgtatatggtttgtgttcttttactgtgtcctctcacattcaagtattagcaacttgcagtatataaaatagttagataatgagaagttgttaattatctctaaaattggaattaggaagcatatcaccaatactgattaacattctctttggaactaggtaagagtggtctcttcttattgaacaacctcaatttagtttcatcccacctttctcagtataatccatgagaggtgtttccaaaaggagatgagggaacaggataggtttcagaagagtcaaatgcttctaatgtctcaaggtgataaaatacaaaaactaagtagacagatatttgtactgaagtctgatacagaattagaaaaaaaaaattcttgttgaaatattttgaaaacaaattccctactatcatcacatgcctccccaaccccaagtcaaaaacaagaggaatggtactacaaacatggctttgtccattaagagctaattcatttgtttatcttagcatactagatttgggaaaatgataactcatcttttctgataattgcctatgttctaggtaacaggaaaacaggcattaagtttattttagtcttcccattttcttcctattactttattgactcattttattgcaaaacaaaaaggattacccaaacaacatgtttcgaacaaggagaattttcaatgaaatacttgattctgttaaaatgcagaggtgctataacattcaaagtgtcagattccttgggagtatggaaaacctaatggtgcttctcccttggaaatgccataggaagcccacaaccgctaacacttacaattttggtgcaaaagcaaacagttccagcaggctctctaaagaaaaactcattgtaacttattaataatatctggtgcaaagtatctgttttgagcttttgactaatccaagtaaaggaatatgaagggattgtaaaaaacaaaatgtccattgatagaccatcgtgtacaagtagatttctgcttgttgaatatgtaaaatagggtaattcattgacttgttttagtattttgtgtgcctaaggtttcttatatacatataagtatataaataagtgattgtttattgcttcagctgcttcaacaagatatttactagtattagactatcaggaatacacccttgcgagattatgttttagattttaggccttagctcccactagaaattatttcttcaccagatttaatggataaagttttatggctctttatgcatccactcatctactcattcttcgagtctacacttattgaatgcctgcaaaatctaagtatcacttttatttttctttggatcaccacctatgacatagtaaacttgaagaataaaaactaccctcagaaatatttttaaaagaagtagcaaattatcttcagtataatccatggtaatgtatgcagtaattcaaattgatctctctctcaataggtttcttaacaatctaaacttgaaacatcaatgttaatttttggaactattgggatttgtgacgcttgttgcagtttaccaaaacaagtatttgaaaatatatagtatcaactgaaatgtttccattccgttgttgtagttaacatcatgaatggacttcttaagctgattaccccactgtgggaaccaaattggattcctactttgttggactctctttcctgattttaacaatttaccatcccattctctgccctgtgattttttttaaaagcttattcaatgttctgcagcattgtgattgtatgctggctacactgcttttagaatgctctttctcatgaagcaaggaaataaatttgtttgaaatgacattttctctc

SEQ ID NO: 261 - protein, 735 aa, Homo sapiens
FFTNPTKNLVSITKDSELPTCSCLDRVIQKDKGPYYTHLGAGPSVAAVREIMENRYGQKGNAIRIEIVVYTGKEGKSSHGCPIAKWVLRRSSDEEKVLCLVRQRTGHHCPTAVMVVLIMVWDGIPLPMADRLYTELTENLKSYNGHPTDRRCTLNENRTCTCQGIDPETCGASFSFGCSWSMYFNGCKFGRSPSPRRFRIDPSSPLHEKNLEDNLQSLATRLAPIYKQYAPVAYQNQVEYENVARECRLGSKEGRPFSGVTACLDFCAHPHRDIHNMNNGSTVVCTLTREDNRSLGVIPQDEQLHVLPLYKLSDTDEFGSKEGMEAKIKSGAIEVLAPRRKKRTCFTQPVPRSGKKRAAMMTEVLAHKIRAVEKKPIPRIKRKNNSTTTNNSKPSSLPTLGSNTETVQPEVKSETEPHFILKSSDNTKTYSLMPSAPHPVKEASPGFSWSPKTASATPAPLKNDATASCGFSERSSTPHCTMPSGRLSGANAAAADGPGISQLGEVAPLPTLSAPVMEPLINSEPSTGVTEPLTPHQPNHQPSFLTSPQDLASSPMEEDEQHSEADEPPSDEPLSDDPLSPAEEKLPHIDEYWSDSEHIFLDANIGGVAIAPAHGSVLIECARRELHATTPVEHPNRNHPTRLSLVFYQHKNLNKPQHGFELNKIKFEAKEAKNKKMKASEQKDQAANEGPEQSSEVNELNQIPSHKALTLTHDNVVTVSPYALTHVAGPYNHWV

SEQ ID NO: 262 - DNA, 1155 bp, Homo sapiens
atggattgcagtaacggatcggcagagtgtaccggagaaggaggatcaaaagaggtggtggggacttttaaggctaaagacctaatagtcacaccagctaccattttaaaggaaaaaccagaccccaataatctggtttttggaactgtgttcacggatcatatgctgacggtggagtggtcctcagagtttggatgggagaaacctcatatcaagcctcttcagaacctgtcattgcaccctggctcatcagctttgcactatgcagtggaattatttgaaggattgaaggcatttcgaggagtagataataaaattcgactgtttcagccaaacctcaacatggatagaatgtatcgctctgctgtgagggcaactctgccggtatttgacaaagaagagctcttagagtgtattcaacagcttgtgaaattggatcaagaatgggtcccatattcaacatctgctagtctgtatattcgtcctgcattcattggaactgagccttctcttggagtcaagaagcctaccaaagccctgctctttgtactcttgagcccagtgggaccttatttttcaagtggaacctttaatccagtgtccctgtgggccaatcccaagtatgtaagagcctggaaaggtggaactggggactgcaagatgggagggaattacggctcatctctttttgcccaatgtgaagacgtagataatgggtgtcagcaggtcctgtggctctatggcagagaccatcagatcactgaagtgggaactatgaatctttttctttactggataaatgaagatggagaagaagaactggcaactcctccactagatggcatcattcttccaggagtgacaaggcggtgcattctggacctggcacatcagtggggtgaatttaaggtgtcagagagatacctcaccatggatgacttgacaacagccctggaggggaacagagtgagagagatgtttagctctggtacagcctgtgttgtttgcccagtttctgatatactgtacaaaggcgagacaatacacattccaactatggagaatggtcctaagctggcaagccgcatcttgagcaaattaactgatatccagtatggaagagaagagagcgactggacaattgtgctatcctga

SEQ ID NO: 263 - protein, 384 aa, Homo sapiens
MDCSNGSAECTGEGGSKEVVGTFKAKDLIVTPATILKEKPDPNNLVFGTVFTDHMLTVEWSSEFGWEKPHIKPLQNLSLHPGSSALHYAVELFEGLKAFRGVDNKIRLFQPNLNMDRMYRSAVRATLPVFDKEELLECIQQLVKLDQEWVPYSTSASLYIRPAFIGTEPSLGVKKPTKALLFVLLSPVGPYFSSGTFNPVSLWANPKYVRAWKGGTGDCKMGGNYGSSLFAQCEDVDNGCQQVLWLYGRDHQITEVGTMNLFLYWINEDGEEELATPPLDGIILPGVTRRCILDLAHQWGEFKVSERYLTMDDLTTALEGNRVREMFSSGTACVVCPVSDILYKGETIHIPTMENGPKLASRILSKLTDIQYGREESDWTIVLS

SEQ ID NO: 264 - DNA, 2732 bp, Homo sapiens
cgcgtcctgtcccggcgccttccgcgcaccggccaccgccagtctccgagccccgtgacctgcaggtcctccggccgcgactccgggccggccctgcgtggtggctgtcggggggcgcgcggggaagcagcggaacttgcggtgtgaggggccggcggggcccggagcggtccccggcccgggaaacttggaccgagaccaggccggcgaccaccaggggcctgaggatgaagccaagtctgctgtgccggcccctgtcctgcttccttatgctgctgccctggcctctcgccaccctgacatcaacaaccctttggcagtgcccacctggggaggagcccgacctggacccagggcagggcacattatgcaggccctgccccccaggcaccttctcagctgcatggggctccagcccatgccagccccatgcccgttgcagcctttggaggaggctggaggcccaggtgggcatggcaactcgagatacactctgtggagactgctggcctgggtggtttgggccttggggggttccccgcgttccatgtcaaccatgttcctgggcacctctgggtactcatggctgtgatgagtgggggcggcgggcccgacgtggcgtggaggtggcagcaggggccagcagcggtggtgagacacggcagcctgggaacggcacccgggcaggtggcccagaggagacagccgcccagtacgcggtcatcgccatcgtccctgtcttctgcctcatggggctgttgggcatcctggtgtgcaacctcctcaagcggaagggctaccactgcacggcgcacaaggaggtcgggcccggccctggaggtggaggcagtggaatcaaccctgcctaccggactgaggatgccaatgaggacaccattggggtcctggtgcgcttgatcacagagaagaaagagaatgctgcggccctggaggagctgctgaaagagtaccacagcaaacagctggtgcagacgagccacaggcctgtgtccaagctgccgccagcgcccccgaacgtgccacacatctgcccgcaccgccaccatctccacaccgtgcagggcctggcctcgctctctggcccctgctgctcccgctgtagccagaagaagtggcccgaggtgctgctgtcccctgaggctgtagccgccactactcctgttcccagccttctgcctaacccgaccagggttcccaaggccggggccaaggcagggcgtcagggcgagatcaccatcttgtctgtgggcaggttccgcgtggctcgaattcctgagcagcggacaagttcaatggtgtctgaggtgaagaccatcacggaggctgggccctcgtggggtgatctccctgactccccacagcctggcctcccccctgagcagcaggccctgctaggaagtggcggaagccgtacaaagtggctgaagcccccagcagagaacaaggccgaggagaaccgctatgtggtccggctaagtgagagcaacctggtcatctgaggggcggtctagtctaaggacactgcggccctgccctgggaggttccgaaggcttcctggaggaggtggagctgcagctgggactgtgaggaccgagaagcaatggcccagcagacgagacagcaaagaccaaggcctggaggtgggagcgtctgccccagtgaggaggcaggtggccggcgggcactgtgtacaggagcaggctgagccccgcccctggccctgctgccatgttgctcccctgaaggatgccccgacccccgtgcctgccctggctggatcctaggagcccacgggattctctgtatcatcagaggctgggcttggcagaggggaggggcctgtgcccgtcacccctggccccattccttggtaattagccacacccttgcctctktacagggccctaagarcagatgtkcgtycccctcctyttycagcaggtctataaagggaaaggggtagcagaaaagtcctgggctargagagtgagtccctgggttctaatcttgggcacatctgtgsccatcrctgggtccatttttctsactgtgaagtaaggagagamgtctcagtacccagggcctcttcagctctttgtaggttctgggctgggttgtgggggactggggagctgggcttctaccaatcccctccccaattagtagcttttatcccagcccccgttttttgctgctttccagggccttctgccttcaaggcccccatggggcttgtcccatccatggctctgcctacggaaggggcttaatgcatgtgcctgcccctcccccagctgtttttaatgaaactgaaaaaatagacttgatcccggcaggactgtgatacagagccctagccctgcccagcccagccccaagatctcaggagctttagggagaagacttggtggggctggagcacaccttgggccttcagtggtttctgtgtccctgtggtgccagtgcttctgggcagtgcaggcggctgccaggcccagccctgacttccactctggctcagcaacctggttatttatgtggggccgtgcaggcatgggcccactgcctgtccatcctgtttctcttatttattgaaactcaccattgccctatccttgtgtctccacccccttccatgtgttgaataataaaaggtgggaaagtgcaaaaaaaaaaaaaaaaaaaaaaaaaaaaaaaaaaaaaaaaaaaa

SEQ ID NO: 265 - protein, 430 aa, Homo sapiens
MKPSLLCRPLSCFLMLLPWPLATLTSTTLWQCPPGEEPDLDPGQGTLCRPCPPGTFSAAWGSSPCQPHARCSLWRRLEAQVGMATRDTLCGDCWPGWFGPWGVPRVPCQPCSWAPLGTHGCDEWGRRARRGVEVAAGASSGGETRQPGNGTRAGGPEETAAQYAVIAIVPVFCLMGLLGILVCNLLKRKGYHCTAHKEVGPGPGGGGSGINPAYRTEDANEDTIGVLVRLITEKKENAAALEELLKEYHSKQLVQTSHRPVSKLPPAPPNVPHICPHRHHLHTVQGLASLSGPCCSRCSQKKWPEVLLSPEAVAATTPVPSLLPNPTRVPKAGAKAGRQGEITILSVGRFRVARIPEQRTSSMVSEVKTITEAGPSWGDLPDSPQPGLPPEQQALLGSGGSRTKWLKPPAENKAEENRYVVRLSESNLVI

SEQ ID NO: 266 - DNA, 3696 bp, Homo sapiens
accagacagttcttaaattagcaagccttcaaaaccaaaaatggggtcgaaaagaggcatatcttctaggcatcattctctcagctcctatgaaatcatgtttgcagctctctttgccatattggtagtgctctgtgctggattaattgcagtatcctgcctgacaatcaaggaatcccaacgaggtgcagcacttggacagagtcatgaagccagagcgacatttaaaataacatccggagttacatataatcctaatttgcaagacaaactctcagtggatttcaaagttcttgcttttgaccttcagcaaatgatagatgagatctttctatcaagcaatctgaagaatgaatataagaactcaagagttttacaatttgaaaatggcagcattatagtcgtatttgaccttttctttgcccagtgggtgtcagatcaaaatgtaaaagaagaactgattcaaggccttgaagcaaataaatccagccaactggtcactttccatattgatttgaacagcgttgatatcctagacaagctaacaaccaccagtcatctggcaactccaggaaatgtctcaatagagtgcctgcctggttcaagtccttgtactgatgctctaacgtgtataaaagctgatttattttgtgatggagaagtaaactgtccagatggttctgacgaagacaataaaatgtgtgccacagtttgtgatggaagatttttgttaactggatcatctgggtctttccaggctactcattatccaaaaccttctgaaacaagtgttgtctgccagtggatcatacgtgtaaaccaaggactttccattaaactgagcttcgatgattttaatacatattatacagatatattagatatttatgaaggtgtaggatcaagcaagattttaagagcttctatttgggaaactaatcctggcacaataagaattttttccaaccaagttactgccacctttcttatagaatctgatgaaagtgattatgttggctttaatgcaacatatactgcatttaacagcagtgagcttaataattatgagaaaattaattgtaactttgaggatggcttttgtttctgggtccaggatctaaatgatgataatgaatgggaaaggattcagggaagcaccttttctccttttactggacccaattttgaccacacttttggcaatgcttcaggattttacatttctaccccaactggaccaggagggagacaagaacgagtggggcttttaagcctccctttggaccccactttggagccagcttgccttagtttctggtatcatatgtatggtgaaaatgtccataaattaagcattaatatcagcaatgaccaaaatatggagaagacagttttccaaaaggaaggaaattatggagacaattggaattatggacaagtaaccctaaatgaaacagttaaatttaaggttgcttttaatgcttttaaaaacaagatcctgagtgatattgcgttggatgacattagcctaacatatgggatttgcaatgggagtctttatccagaaccaactttggtgccaactcctccaccagaacttcctacggactgtggaggaccttttgagctgtgggagccaaatacaacattcagttctacgaactttccaaacagctaccctaatctggctttctgtgtttggattttaaatgcacaaaaaggaaagaatatacaacttcattttcaagaatttgacttagaaaatattaacgatgtagttgaaataagagatggtgaagaagctgattccttgctcttagctgtgtacacagggcctggcccagtaaaggatgtgttctctaccaccaacagaatgactgtgcttctcatcactaacgatgtgttggcaagaggagggtttaaagcaaactttactactggctatcacttggggattccagagccatgcaaggcagaccattttcaatgtaaaaatggagagtgtgttccactggtgaatctctgtgacggtcatctgcactgtgaggatggctcagatgaagcagattgtgtgcgttttttcaatggcacaacgaacaacaatggtttagtgcggttcagaatccagagcatatggcatacagcttgtgctgagaactggaccacccagatttcaaatgatgtttgtcaactgctgggactagggagtggaaactcatcaaagccaatcttctctaccgatggtggaccatttgtcaaattaaacacagcacctgatggccacttaatactaacacccagtcaacagtgtttacaggattccttgattcggttacagtgtaaccataaatcttgtggaaaaaaactggcagctcaagacatcaccccaaagattgttggaggaagtaatgccaaagaaggggcctggccctgggttgtgggtctgtattatggcggccgactgctctgcggcgcatctctcgtcagcagtgactggctggtgtccgccgcacactgcgtgtatgggagaaacttagagccatccaagtggacagcaatcctaggcctgcatatgaaatcaaatctgacctctcctcaaacagtccctcgattaatagatgaaattgtcataaaccctcattacaataggcgaagaaaggacaacgacattgccatgatgcatctggaatttaaagtgaattacacagattacatacaacctatttgtttaccggaagaaaatcaagtttttcctccaggaagaaattgttctattgctggttgggggacggttgtatatcaaggtactactgcaaacatattgcaagaagctgatgttcctcttctatcaaatgagagatgccaacagcagatgccagaatataacattactgaaaatatgatatgtgcaggctatgaagaaggaggaatagattcttgtcagggggattcaggaggaccattaatgtgccaagaaaacaacaggtggttccttgctggtgtgacctcatttggatacaagtgtgccctgcctaatcgccccggagtgtatgccagggtctcaaggtttaccgaatggatacaaagttttctacattagcgcatttcttaaactaaacaggaaagtcgcattattttcccattctactctagaaagcatggaaattaagtgtttcgtacaaaaattttaaaaagttaccaaaggtttttattcttacctatgtcaatgaaatgctagggggccagggaaacaaaattttaaaaataataaaattcaccatagcaatacagaataactttaaaataccattaaatacatttgtatttcattgtgaacaggtatttcttcacagatctcatttttaaaattcttaatgattatttttattacttactgttgtttaaagggatgttattttaaagcatataccatacacttaagaaatttgagcagaatttaaaaaagaaagaaaataaattgtttttcccaaagtatgtcactgttggaaataaactgccataaattttctagttccagtttagtttgctgctattagcagaaactcaattgtttctctgtcttttctatcaaaattttcaacatatgcataaccttagtattttcccaaccaatagaaactatttattgtaagcttatgtcacaggcctggactaaattgattttacgttcctctt

SEQ ID NO: 267 - protein, 1019 aa, Homo sapiens
MGSKRGISSRHHSLSSYEIMFAALFAILVVLCAGLIAVSCLTIKESQRGAALGQSHEARATFKITSGVTYNPNLQDKLSVDFKVLAFDLQQMIDEIFLSSNLKNEYKNSRVLQFENGSIIVVFDLFFAQWVSDQNVKEELIQGLEANKSSQLVTFHIDLNSVDILDKLTTTSHLATPGNVSIECLPGSSPCTDALTCIKADLFCDGEVNCPDGSDEDNKMCATVCDGRFLLTGSSGSFQATHYPKPSETSVVCQWIIRVNQGLSIKLSFDDFNTYYTDILDIYEGVGSSKILRASIWETNPGTIRIFSNQVTATFLIESDESDYVGFNATYTAFNSSELNNYEKINCNFEDGFCFWVQDLNDDNEWERIQGSTFSPFTGPNFDHTFGNASGFYISTPTGPGGRQERVGLLSLPLDPTLEPACLSFWYHMYGENVHKLSINISNDQNMEKTVFQKEGNYGDNWNYGQVTLNETVKFKVAFNAFKNKILSDIALDDISLTYGICNGSLYPEPTLVPTPPPELPTDCGGPFELWEPNTTFSSTNFPNSYPNLAFCVWILNAQKGKNIQLHFQEFDLENINDVVEIRDGEEADSLLLAVYTGPGPVKDVFSTTNRMTVLLITNDVLARGGFKANFTTGYHLGIPEPCKADHFQCKNGECVPLVNLCDGHLHCEDGSDEADCVRFFNGTTNNNGLVRFRIQSIWHTACAENWTTQISNDVCQLLGLGSGNSSKPIFSTDGGPFVKLNTAPDGHLILTPSQQCLQDSLIRLQCNHKSCGKKLAAQDITPKIVGGSNAKEGAWPWVVGLYYGGRLLCGASLVSSDWLVSAAHCVYGRNLEPSKWTAILGLHMKSNLTSPQTVPRLIDEIVINPHYNRRRKDNDIAMMHLEFKVNYTDYIQPICLPEENQVFPPGRNCSIAGWGTVVYQGTTANILQEADVPLLSNERCQQQMPEYNITENMICAGYEEGGIDSCQGDSGGPLMCQENNRWFLAGVTSFGYKCALPNRPGVYARVSRFTEWIQSFLH

SEQ ID NO: 268 - DNA, 1186 bp, Homo sapiens
ggggctgcagtagcagcggcgccgcccgcggctcccgctggggcctgggcgccggccccgctctgcaggatgggcacagtgctgtctctttcgcctgcctcctcggccaagggccggaggcccggcgggctgcccgaggagaagaagaaggcgccgcccgcgggggacgaggcgctggggggctacggggcgccgccagtgggcaagggcggcaaaggcgagagccgactcaagcggccgtccgtgctcatctcggcgctcacctggaagcgcctggtggccgcgtccgccaagaagaagaaaggcagcaagaaggtgacacccaagccggcatccacgggccccgaccccctggtccagcaacgcaaccgcgagaaccttctccgcaagggccgggatccccccgacggcggcggcaccgccaagcccctggcggtgccagtgcccaccgtgcccgcggctgccgccacctgcgagccaccgtcggggggcagcgcggccgctcagccgccgggctcgggcgggggaaagcctccgccgccgcctcccccagccccgcaggtggcgccgccggtgcctggcggctcgccgcggcgggtcatcgtgcaggcgtccaccggcgagctgctgcgctgtctgggcgacttcgtgtgccgacgctgctatcgcctcaaggagctgagcccgggcgagctggtgggctggttccgcggtgtggaccgctcgctgctgctgcagggctggcaagaccaggccttcattacgcctgcaaacctggtgttcgtgtacctgctgtgccgcgagtcgctgcgtggggacgagctggcgtcggccgccgagctgcaggccgccttcctcacctgcctctacctcgcctactcctacatgggcaacgagatctcctacccactcaagcccttcctcgtggagcccgacaaggagcgcttctggcagcgctgcctgcgcctcatccagcggctcagcccgcagatgctgcggctcaacgccgacccccacttcttcacgcaggtctttcaagacctcaagaacgagggcgaggccgccgccagcggtgggggcccaccgagcgggggcgcgcccgccgcctcctcggccgccagggacagctgcgcggccggaaccaagcactggactatgaacctggaccgctagggatacccagggg

SEQ ID NO: 269 - protein, 367 aa, Homo sapiens
MGTVLSLSPASSAKGRRPGGLPEEKKKAPPAGDEALGGYGAPPVGKGGKGESRLKRPSVLISALTWKRLVAASAKKKKGSKKVTPKPASTGPDPLVQQRNRENLLRKGRDPPDGGGTAKPLAVPVPTVPAAAATCEPPSGGSAAAQPPGSGGGKPPPPPPPAPQVAPPVPGGSPRRVIVQASTGELLRCLGDFVCRRCYRLKELSPGELVGWFRGVDRSLLLQGWQDQAFITPANLVFVYLLCRESLRGDELASAAELQAAFLTCLYLAYSYMGNEISYPLKPFLVEPDKERFWQRCLRLIQRLSPQMLRLNADPHFFTQVFQDLKNEGEAAASGGGPPSGGAPAASSAARDSCAAGTKHWTMNLDR

SEQ ID NO: 270 - DNA, 513 bp, Homo sapiens
  misc_feature (457)..(457): n = unknown
  misc_feature (497)..(497): n = unknown
  misc_feature (499)..(499): n = unknown
  misc_feature (509)..(509): n = unknown
ttttatttttttttttcttaaaaaggatactttaatttattgacactgggaagcacattggcaaagaaagtcaatttcttttacagtatctaatagctatttctattgcctgttcaaactagcaaaatgtaacagatgctagattccctaaagtacggcgctttaggttacatttgcaacaatagcttacatctaaatgttacattagttactgaatttgtaatcttcacaaatgtgtgaatagtcagttgatcaaaaataacgatttcctgctacaagagaacgcatagcagaaaatgttcccaacacaaagataatgtttgagatgatggatatcccaattacactgatttgataattatacattgaatacatgtatcacaacatcagatgtatccctgaaaatatgtacaactatatcagtttaaagatataaaaaaaattttctgtccaaagntaaatatgtacaactacgatatatcagtttaaagatacananaatataattntctg

SEQ ID NO: 271 - protein, 34 aa, Homo sapiens
MLDSLKYGALGYICNNSLHLNVTLVTEFVIFTNV

SEQ ID NO: 272 - DNA, 408 bp, Homo sapiens
ttagtttttgggggatttttccctggcagatatatagagcaatgctttttctctttggatcctgttcctaccctgggaattcttttcagtcaactgaaattttgttaaaaagcaattttatgttccttccatctgttcacttttttgttgttgttgttgtcggcatgatttttactgagaaaaatgtaaaacatccttggcctttttgggaagtttaaaatcttcccaaattgagccctctaagaattgttttcccatttactgttggcccttcttcctttctgccaccttcaataacacacgaagaaatcgagagggaacttctagcagtcctgagaccccttgagaaaccagaaaaaggtgccatacaccctcctttttggggtcttttgtcttcctcacggagcc

SEQ ID NO: 273 - protein, 58 aa, Homo sapiens
MLFLFGSCSYPGNSFQSTEILLKSNFMFLPSVHFFVVVVVGMIFTEKNVKHPWPFWEV

SEQ ID NO: 274 - DNA, 1646 bp, Homo sapiens
gctcggctcactgagacccggtggtccagacgctgctcctggctggggtggcgctgcagggagaaccgcgagctctcaggggtcggcgggtgacttctttccggaagaaagcgaggaacgcgctctgcggggtgagccggactccccaactccggacgatcagcccaggactgagagccccgaagtccccaaccacaagtaagcggccccagaaggacaagtctaggtcgccgtccagagcgccatggccgcgcccgcccttcgtttgtgccacatcgccttccacgtgcccgccgggcagcccctagcccggaacctgcagcgcctcttcggcttccagcccctggcttcgcgggaggtggacggctggcggcagctagccctgcgcagcggcgacgcggtctttttggtgaacgagggcgcagggtctggagagccgctgtacggcctggatccgcgtcacgccgtgcccagcgccacaaacctgtgcttcgacgtggcggacgccggcgctgcaacccgggagctggcagcgctgggctgcagcgtgcctgtccctcccgttcgcgtgcgggacgcgcagggtgccgccacttacgccgtggtcagctcgcctgccggcatcctcagcctgaccttgctggagcgcgctggctaccgcggacccttcctacccggcttcaggcccgtgtcctctgcgcctggccccgggtgggtcagccgcgtggaccacctgaccttggcctgcacccccggcagctcccccacacttttgcgctggttccacgactgcctgggcttttgccacttgccgctgagcccaggtgaggatcccgagctgggcctcgaaatgacagcagggtttgggcttgggggactgaggcttacagccctgcaggcccagccgggcagcattgtccccactcttgttctggctgagtcccttccgggggcgacgacacgacaggaccaggtggagcagttcctggcccggcacaaggggccaggcctgcagcacgtggggctgtatacgcctaacattgtggaggccactgagggggtggcaactgctggaggccagttcctggctccccctggggcatactaccagcagccaggaaaggagaggcagatccgagctgcagggcacgagcctcatctgcttgctcgacaggggatcctgctagatggtgataaaggcaagtttctgcttcaggtcttcaccaagtccctttttactgaggacactttcttcctggagctgattcagaggcagggggccactggctttggtcagggcaacatcagagctctgtggcagtccgtacaggagcaatctgccaggagccaggaagcctaaggatgcccagggctgggtgcagccagctgtcctgcagctctggggagaccagcacagaactgaggaacatctgcaggaggcccaactagtgaaaggctttgcctccggggggcaggtgtgacttccatttcatcagtgcctgccagaagctgtgtctctcattgggctccaaagaggtgggattttttaaaactaaaacatttcttatatacagtctataataaatatgtaagatacaaagaacaataaaagaattacacactaggaaaaaaaaaaaaaaaaaaaa

SEQ ID NO: 275 - protein, 393 aa, Homo sapiens
MTTYSDKGAKPERGRFLHFHSVTFWVGNAKQAASFYCSKMGFEPLAYRGLETGSREVVSHVIKQGKIVFVLSSALNPWNKEMGDHLVKHGDGVKDIAFEVEDCDYIVQKARERGAKIMREPWVEQDKFGKVKFAVLQTYGDTTHTLVEKMNYIGQFLPGYEAPAFMDPLLPKLPKCSLEMIDHIVGNQPDQEMVSASEWYLKNLQFHRFWSVDDTQVHTEYSSLRSIVVANYEESIKMPINEPAPGKKKSQIQEYVDYNGGAGVQHIALKTEDIITAIRHLRERGLEFLSVPSTYYKQLREKLKTAKIKVKENIDALEELKILVDYDEKGYLLQIFTKPVQDRPTLFLEVIQRHNHQGFGAGNFNSLFKAFEEEQNLRGNLTNMETNGVVPGM

SEQ ID NO: 276 - DNA, 1913 bp, Homo sapiens
gcacgaggcaggccgaagtccgcagccccggctcggcgcccgctgcttgcacctcccggatggtgctgactgctccctaagcggcggcggcggcgagtcgtgaggacgcgccgcggaggctgttcggggtcgaggcttcccgtcgccggcacttcctcttgcggcgcccgtgcgcggccggcccggcaggcgggatgagcggccgcggctccgggaacggccgcgcatcggcgccccggctgcttctgctctttctggttccgctgctgtgggccccggctgcggtccgggccggcccagatgaagaccttagccaccggaacaaagaaccgccggcgccggcccagcagctgcagccgcagcctgtggctgtgcagggccccgagccggcccgggtcgagaaaatatttacaccagcagctccagttcataccaataaagaagatcctgctacccaaactaatttgggatttatccatgcatttgtcgctgccatatcagttattattgtatctgaattgggtgataagacattttttatagcagccatcatggcaatgcgctataaccgcctgaccgtgctggctggtgcaatgcttgccttgggactaatgacatgcttgtcagttttgtttggctatgccaccacagtcatccccagggtctatacatactatgtttcaactgtattatttgccatttttggcattagaatgcttcgggaaggcttaaagatgagccctgatgagggtcaagaggaactggaagaagttcaagctgaattaaagaagaaagatgaagaatttcaacgaaccaaacttttaaatggaccgggagatgttgaaacgggtacaagcataacagtacctcagaaaaagtggttgcattttatttcacccatttttgttcaagctcttacattaacattcttagcagaatggggtgatcgctctcaactaactacaattgtattggcagctagagaggacccctatggtgtagccgtgggtggaactgtggggcactgcctgtgcacgggattggcagtaattggaggaagaatgatagcacagaaaatctctgtcagaactgtgacaatcataggaggcatcgtttttttggcgtttgcattttctgcactatttataagccctgattctggtttttaacgctgtttgttcatctatatttagtttaaaataggtagtattatctttctgtacatagtgtacattacaactaaaagtgatgggaaaaatactgtattttgtaggcactggattttgtgagtttgaccccttattatgtctggaggatataatcattggattcctatcttgtgccaagggagtttttaaaaggaaaccctgactttttaagtgtgggggttttttcttctcttcccaaccttaattatggtttaatatggtcctcatttttcttttggtgcagaaccgttgtgcagtggggtctaccatgcaattttctttcagcactgacccctttttaaggaatacaaattttctccttcatcacttaggtgttttaagatgtttaccttaaagttttcttggggaaagaatgaattaatttctatttcttaaaacatttccctgagccagtaaacagtagtttaatcattggtcttttcaaaactaggtgtttaaaaaaagagacatatatgatattgctgttatatcaataacatggcacaacaagaactgtctgccaggtcattcttcctcttttttttttaattgggtaggacaccccatataaaaaccatccatatttggccatgtgggattacccaaataaaagaggaatccatggatggattcagaatttttttaaatttaataaaccaaccaacccttggttcccatatttaattaaaaggagggttgcccagt

SEQ ID NO: 277 - protein, 324 aa, Homo sapiens
MSGRGSGNGRASAPRLLLLFLVPLLWAPAAVRAGPDEDLSHRNKEPPAPAQQLQPQPVAVQGPEPARVEKIFTPAAPVHTNKEDPATQTNLGFIHAFVAAISVIIVSELGDKTFFIAAIMAMRYNRLTVLAGAMLALGLMTCLSVLFGYATTVIPRVYTYYVSTVLFAIFGIRMLREGLKMSPDEGQEELEEVQAELKKKDEEFQRTKLLNGPGDVETGTSITVPQKKWLHFISPIFVQALTLTFLAEWGDRSQLTTIVLAAREDPYGVAVGGTVGHCLCTGLAVIGGRMIAQKISVRTVTIIGGIVFLAFAFSALFISPDSGF

SEQ ID NO: 278 - DNA, 369 bp, Homo sapiens
attctattgacctccccaaaggaggaggtcgtggccttcccaaagcgcagtagccacggtggaaacgaaagcgtgccgcataagcctaccgtctaccgcccgcacatcaggaacctcacggtacttcagggaagcagttaagtcaagccggcgcgtcacaggcactcggcgtgcaagccgccccgcaggtgctaccgtctcttacctctctctacttttaggaaacacgttgtatccccggagggggtgcaccgttcctggaggtactgcaataccaggtcgatgcgtggagtggacggagcaagctcctattccatctccctgctccaaaaatccatttaatatattgtcctcggatagaggacgtat

SEQ ID NO: 279 - protein, 46 aa, Homo sapiens
ILLTSPKEEVVAFPKRSSHGGNESVPHKPTVYRPHIRNLTVLQGSS

SEQ ID NO: 280 - DNA, 1601 bp, Homo sapiens
agaggcggtgcggcacagaggagcgctcgcttcacaaggtgaccctagctcccaccgccaccgccgcggtcgcgctccagacgccctccagcagctccgcgccctcccaggcacccggcctttctttctccctcttgcaaccaagatccgtccggccgctggagacccagggagccggggttaggaactcacttggggctttcccctcccccaccggagagccccgggatggagagccgaaaggacatggttgtgtttctggatgggggtcagcttggcactctggttggcaagagagtctcaaatttgtccgaagccgtgggcagcccgctgccggagccgcccgagaaaatggtgccccgtggttgcctgagccctcgggccgtccctccggccacccgggagcgcggcgggggaggcccggaggaggagccggtagatggactcgcaggcagcgcggcggggccgggcgccgagccccaggtagctggggcggccatgctcggcccaggacccccggccccctcagtcgacagcctctccggacaggggcaacccagtagctcggacaccgagtcggatttctatgaagaaatcgaggtgagctgcaccccggactgcgccaccgggaacgccgagtaccagcacagcaaagggtccggctccgaggcgctggtcggcagtccgaacggagggagcgagacccccaagagcaacggcggcagtggtgggggcggctcgcaaggcaccctggcgtgcagcgccagtgaccagatgcgtcgttaccgcaccgccttcacccgagagcagattgcgcggctggagaaggaattctaccgggagaactacgtatccaggccgcggagatgtgagctggcggccgccctaaacctgccggaaaccaccatcaaggtgtggttccagaaccggcgcatgaaggacaagcggcagcgcctggccatgacgtggccgcacccggcggaccccgccttctacacttacatgatgagccatgcggcggccgcgggcggcctgccctaccccttcccatcgcacctgcccctgccctactactcgccggtgggcctgggcgccgcatccgccgcctccgccgccgcctcgcccttcagcggctcgctgcgcccgctcgacacgttccgcgtgctgtcgcagccctacccgcggcccgaactgctgtgcgccttccgccacccgccgctctaccccgggcccgcgcacggactgggcgcctctgccggcggcccctgctcctgcctcgcctgtcacagcggcccggccaacgggctggcgccccgggctgccgccgcctcggacttcacctgtgcctccacctcccgctcggactccttcctcaccttcgcgccctcggtgctcagcaaggcctcctccgtcgcgctggaccagagggaggaggtgcccctcactagataaggggccgggctggtggctgccggctccatgacgcccgtggggtcaccccccggcccgggactcagccagcctcgcctcctcgctcctcgctcctcgcccctaggacgccaagggggaaaggagagggcggaaaaggaccagcgggatcc

SEQ ID NO: 281 - protein, 407 aa, Homo sapiens
MESRKDMVVFLDGGQLGTLVGKRVSNLSEAVGSPLPEPPEKMVPRGCLSPRAVPPATRERGGGGPEEEPVDGLAGSAAGPGAEPQVAGAAMLGPGPPAPSVDSLSGQGQPSSSDTESDFYEEIEVSCTPDCATGNAEYQHSKGSGSEALVGSPNGGSETPKSNGGSGGGGSQGTLACSASDQMRRYRTAFTREQIARLEKEFYRENYVSRPRRCELAAALNLPETTIKVWFQNRRMKDKRQRLAMTWPHPADPAFYTYMMSHAAAAGGLPYPFPSHLPLPYYSPVGLGAASAASAAASPFSGSLRPLDTFRVLSQPYPRPELLCAFRHPPLYPGPAHGLGASAGGPCSCLACHSGPANGLAPRAAAASDFTCASTSRSDSFLTFAPSVLSKASSVALDQREEVPLTR

SEQ ID NO: 282 - DNA, 201 bp, Homo sapiens
atcatgatcgctctacatcgatacgactttttctttttttttttttttttttttgcctagtatgaaaatatacccaataccaccttctttattgctgactgggaatgtcctctcaaagctcctaaaattcttgactgtctccttttttgcctttctctagctggactattttgattatacccttctgtcgtcttctcgcag

SEQ ID NO: 283 - protein, 32 aa, Homo sapiens
MKIYPIPPSLLLTGNVLSKLLKFLTVSFFAFL

SEQ ID NO: 284 - DNA, 661 bp, Homo sapiens
ggagtggcagccggagtctgaactgtcctgggggaccaagcaggagcttaagatgggcaagacctggggccctgggcagacgcatcaaagcaggcagaagcaggcatggccagcaggaagaccaagaagaaggaagggggtgccctccgggcccagagagcctcatccaatgtcttctccaactttgagcagactcagatccaggagttcaaggaggcattcacactcatggatcagaaccgagatggcttcattgacaaggaggacctgaaggacacctatgcctccctgggcaagaccaacgtcaaggacgacgagctggacgccatgctcaaagaggcctcggggcccatcaacttcaccatgtttctgaacctgtttggggagaagctgagcggtaccgacgccgaggagaccattcttaacgccttcaagatgctggacccggacgggaaagggaaaatcaacaaggagtacatcaagcgtctgctgatgtcccaggctgacaagatgacggcggaagaggtggaccagatgttccagttcgcctccatcgatgtggcgggcaacctggactacaaggcgctcagctacgtgatcacccacggggaggagaaggaggagtgagacccagccgggtcaataaacctggacgcttgga

SEQ ID NO: 285 - protein, 173 aa, Homo sapiens
MASRKTKKKEGGALRAQRASSNVFSNFEQTQIQEFKEAFTLMDQNRDGFIDKEDLKDTYASLGKTNVKDDELDAMLKEASGPINFTMFLNLFGEKLSGTDAEETILNAFKMLDPDGKGKINKEYIKRLLMSQADKMTAEEVDQMFQFASIDVAGNLDYKALSYVITHGEEKEE

SEQ ID NO: 286 - DNA, 296 bp, Homo sapiens
tagtgctcaatgatttttattttagcaaattgtagtcatttccatacattattttttacagtaaacattgccggatacatttccatacgtttttaaagaatagaggaggaggaagaggagggaaaaaaaggaaaataaataaataaacgtgtggagcaatcaactccagaatcacaccaatatttctaggtctaatggccacacagcaaaatcagcctcagttatcccattgtcttcatatcttaagaccccgcgatcctggccttctcgtaagctccccggacccgggcgtcctc

SEQ ID NO: 287 - protein, 34 aa, Homo sapiens
MATQQNQPQLSHCLHILRPRDPGLLVSSPDPGVL

SEQ ID NO: 288 - DNA, 2076 bp, Homo sapiens
ggcacgaggagcggatgagatcgtggggctcaccagcgtcccccatggcttctgagtagcgtgggagtggagtcagcaccaagccaggctccccgcgcctgccttgccctcacctgctcctgctctctgccagaggcagcatggtccgcagggcaccatggggcccgacagagtgacagcacgagaactgtgcgagaacgacgacctggccaccagcctcgtcctggacccctacctcggtttccgcacccataagatgaacgtcaggtctatcgctacctccgtgccttcctgccggaaagtggctttaccatcctgccctgcacgcgctactccatggagaccaacggggccaagatcgtgtccactcgtgcttggaaaaagaatgagaagctggagctgctggtgggctgcattgcagagctgcgggaggcagatgaggggctgctgagggccggtgagaatgacttcagcatcatgtactcaacccgcaagcggagtgctcagctgtggctgggcccagccgccttcatcaaccatgactgcaaacccaactgcaagtttgtgcctgcagatgggaacgcagcctgcgtgaaggtgctccgggacattgagcctggggacgaggtgacatgcttctacggcgagggcttcttcggcgagaagaatgagcactgtgaatgccacacctgtgagaggaaaggtgaaggagctttccgaaccaggcctagggagcccgcgttgccaccacggcccctggacaagtaccagctgcgtgagaccaagcggcggctgcagcaaggcctggacagtggcagccgacagggcctgctgggccctcgggcctgcgtgcacccatccccgctgcgccgggacccattctgcgccgcctgccagcccctgcgcctgccagcctgcagcgcccgcccagacacctcacccctctggctccagtggctgcctcagccccagccccgagtgcggccccggaagcgccgacgcccccggccccggagggccccagtgctctccacccaccacgctgcccgcgtctccctgcaccgatggggaggctgtggcccccactgccgcctgcgaggagaggccctggtggccctgggccagcccccccacgcccgctgggcccctcagcaggactggcactgggcccggcgctatgggctgccttacgtggtgcgtgtggaccttcgtcgcctggccccagccccaccagctaccccagcccctgctgggaccccaggccccatcctgatcccgaagcaggccctcgccttcgcccccttctccccacccaagcgcctacggctggtggtcagccacggctccatcgacctggatgtcggcggtgaagagctgtgacaggccggacggggaggcccagcagggagagagggtctctctcctagctgctacccaggacctccagaaggagcccttggacctctgggagggagctgacccttgactccagcatagctctgaccctggaatggggttggtttggacacccccagggatctgagccctgaccctttgtgactgctgacccctgagccacccccactcccacagggagccccggccatttgctgccctccccacccctgccccagcctcaggactgcaggagccatccgcccccctcagccccttcctccccagggagcaaagccataaggggcaggggccaccccacggcatctccccagaagtacaggcctcaggaggaggtggaactgatgtagggggtggcactccccagagactgccctcacgaggggactgggttcgctctcagctctgcagctgtctgcggtggggggaaggttggggggtgtctggaggcatgttcccctcaccaccccccgtgggtctcagggaggccgggtgtgacctcatctttctcatggtgctatcctggtgctattggggtggggagctccctcccctcccccacaccagaaaggggtatgttgggggcttggaagcacttgaactttttattttattaaaaccttgttataagcagcaaaaaaaaaaaaaaaaaaaaaaaaa

SEQ ID NO: 289 - protein, 346 aa, Homo sapiens
METNGAKIVSTRAWKKNEKLELLVGCIAELREADEGLLRAGENDFSIMYSTRKRSAQLWLGPAAFINHDCKPNCKFVPADGNAACVKVLRDIEPGDEVTCFYGEGFFGEKNEHCECHTCERKGEGAFRTRPREPALPPRPLDKYQLRETKRRLQQGLDSGSRQGLLGPRACVHPSPLRRDPFCAACQPLRLPACSARPDTSPLWLQWLPQPQPRVRPRKRRRPRPRRAPVLSTHHAARVSLHRWGGCGPHCRLRGEALVALGQPPHARWAPQQDWHWARRYGLPYVVRVDLRRLAPAPPATPAPAGTPGPILIPKQALAFAPFSPPKRLRLVVSHSIDLDVGGEEL

SEQ ID NO: 290 - DNA, 377 bp, Homo sapiens
ctactactactactaaattcgcggccgcgtcgacttttttttttttttttagagatggggtctcgctcagtcacccaggctagagtgcaatgacacgacatagctcactgtagcctcggactcctgggctcaagcaatcctcccacctcagcctctggagtagctgggaccacaggtgcaagctactatgcctgtctctattataccttacatacattttcacagttgtctatttccttattatcatttgtctcttcttactgtgttcactgtacccacttgttttaaatatatttattcctcgccttattccaaagtctttatcggttttatagattgcatttaaaatctgatattttgacgtcgacgcggccgcg

SEQ ID NO: 291 - protein, 673 aa, Homo sapiens
  MISC_FEATURE (1)..(673): X = unknown
GWVWWLTPVIPALWETRRADHLRSGVXDQPDQHGETVSLLKIHKLARNGGPCLXSQLHGRQRQENRLNPGGXGCSEPKLATALQPGCQSKGLSQKQKQSKKKKKKTPKNKXXXAGCGGSRLSSQHFGRPGGQITXGQEFETSLINMVKLCLYXKYINXPGMAAHACNPSYTGDRGRRIAXTQEVEAAVSQNLPLHSSRGVRARAYLKNKNKAKKKKKKPPKTKXXXLGVVAHACHPSTLGDQEGRSLEVRSLRPAXSTWXNCVSIKNTXISQEWRPMPVIPATRETEAGESLEPRRLRLQXAKTCHCTPAGVSEQGPISKTKTKQKKKKKNPQKQXXXFCFWGFFFFFFCFVFVFEIGPCSDTPAGVQWQVLAHCSLNLLGSSDSPASVSRVAGITGMGRHSWLIYVFLIETQFHHVDQAGLKLLTSSDLPSWSPKVLGXQAXATTPSXXXFVFGGFFFFFFALFLFLRXALALTPRLECSGKFWLTAASTSWVQAILLPLSPVXLGLQAWAAIPGXFMYFXXRHSFTMLIRLVSNSXPQVICPPGLPKCWDDRREPPHPAXXXLFLGVFFFFFLLCFCFXDRPLLXHPGWSAVASFGSLQPQPPGFKRFSCLCLPCSWDYRHGPPFLANLCIFNRDTVSPCXSGWSQTPDLKXSALLVSQSAGMTGVSHHTQ

SEQ ID NO: 292 - DNA, 125 bp, Homo sapiens
gcggccgcctactactactatacggctgcgagaagacgacagaagggcgaaaaactcactctacctccttgaagggagtgcaaggaaagttgtcttgatgccaggtaaaacaaaaaaaaaaaaaa

SEQ ID NO: 293 - protein, 33 aa, Homo sapiens
LREDDRRAKNSLYLLEGSARKVVLMPGKTKKKK

SEQ ID NO: 294 - DNA, 854 bp, Homo sapiens
cccggatccctgcggctgcctgcactctggaccacgagctctgagagcagcaggttgagggccggtgggcagcagctcggaggctccgcgaggtgcaggagacgcaggcatggccggtgagctgactcctgaggaggaggcccagtacaaaaaggctttctccgcggttgacacggatggaaacggcaccatcaatgcccaggagctgggcgcggcgctgaaggccacgggcaagaacctctcggaggcccagctaaggaaactcatctccgaggttgacagcgacggcgacggcgaaatcagcttccaggagttcctgacggcggcaaggaaggccagggccggcctggaggacctgcaggtcgccttccgcgccttcgaccaggatggcgacggccacatcaccgtggacgagctcaggcgggccatggcggggctggggcagccgctgccgcaggaggagctggacgccatgatccgcgaggccgacgtggaccaggacgggcgggtgaactacgaggagttcgcgaggatgctcgcccaggagtgaggctccccgcctgtgtccccctggctgcgctctgagccttcagggccaccgcccgctgctgcttttgtgctgggactctccggggaaacctggtcggtggatgggaaactgcctccccctgggaggaaggctttgcgctccggggcctggatgcggcgccctcgggccgcctgcgagcccctctctgccttcagaccttgggcagaaggaggcctccttgggcctggtccccctttgccctgcagtggaatgagggccccttaaccccgcattgatctaaataaaggactgccgagttccaaaa

SEQ ID NO: 295 - protein, 146 aa, Homo sapiens
MAGELTPEEEAQYKKAFSAVDTDGNGTINAQELGAALKATGKNLSEAQLRKLISEVDSDGDGEISFQEFLTAARKARAGLEDLQVAFRAFDQDGDGHITVDELRRAMAGLGQPLPQEELDAMIREADVDQDGRVNYEEFARMLAQE

SEQ ID NO: 296 - DNA, 154 bp, Homo sapiens
cgagaagacgacagaagggcaacatttgagctgattcttaaaaaaaaaaaaaaaaaaatagagatacacgagaaatccaaattaggatagaattccagaagaagggagtagcatgtgcaaaaaaaaaaaaaaaaaaaaaaaaaagtcgtatcga

SEQ ID NO: 297 - protein, 29 aa, Homo sapiens [sequence omitted]

SEQ ID NO: 298 - DNA, 452 bp, Homo sapiens
  misc_feature (1)..(452): n = unknown
tttttgcctgagatcaggtctcactggagtacagtggtgtcgtttgggttcactgcaacctcttacctcccctccaacttggcctcctgggtagctaagactacaggtacacgccaccgtgcccagctagtttcttttatttttggtagagtcagggtttcgccttgttgccccagatagtcttgaactcctgagttctagccatccacccgcctctggcccctcaaagtgctgggattataggcgtcacccaccacgcccagccagagtaagccttttgtgtgtttatcanatcancccccnctncnnaatatgttatactgttgcgagtgacagaagaggaaacagccacagaaaggtaattgctcaaggctgcagagttaagtgctagagctggattcaaatccaggcagtccagctacagaacactgctgctgtgcgctcgggatggg

SEQ ID NO: 299 - protein, 375 aa, Homo sapiens [sequence omitted]

SEQ ID NO: 300 - DNA, 496 bp, Homo sapiens
  misc_feature (11)..(11): n = unknown
tgaagaactcngtttaatgacatatatctgacatgttctgtggagccagaattcaaaacccagatacgcaggaggacacattcttgatcggtattttattctattatttttattagttccaatccttatgactctgtttaaaatgagtatctgcattattgtgcaaacacttctgagatctcatcacatacctgatcccatttaacttcagtctatccctccattactttttgtggaaagtgctatctaagttggaggttctgcttgagtattcttaatttttcttctttttaatgcatacggtggtcaaagtaaatagctaacatattggcatcaaaccattgcctattgaagcaagctttgaatgaaattggtttgtcattgaccactgtgagaaactcatttgtaaagataatactgaaaaacatcctgactcttatgtatgcttgcctgtctctgaactccacctctatcagcatactcaatacattgcctc

SEQ ID NO: 301 - protein, 56 aa, Homo sapiens
LASNHCLLKQALNEIGLSLTTVRNSFVKIILKNILTLMYACLSLNSTSISILNTLP

SEQ ID NO: 302 - DNA, 456 bp, Homo sapiens
tttaactcttagaatccaagtgactcatctgtgtgcttgaatcctttccactgtctcatctccctcatccaagtttctagtaccttctctttgttgtgaaggataatcaaactgaacaacaaaaagtttactctcctcatttggaacctaaaaactctcttcttcctgggtctgagggctccaagaatccttgaatcagttctcagatcattgtggacaccagatcaggaacctcaggcacgtgggaaaggccagataattaggagggatgctgaagagaaagcccgatgaccacagcacggtgatggtttaaaggccttgaaatttggttaccatcattccccaacccaccaaccgcccatgggtagcattcaccagcacgcactggcagccgcagccacccgttctctttccttgcattgctgagcaagtttcccatatcattcagttaggctc

SEQ ID NO: 303 - protein, 43 aa, Homo sapiens [sequence omitted]

SEQ ID NO: 304 - DNA, 354 bp, Homo sapiens
tttctattgatgcaaacaggctgttgcctaaagcaggggttaatactccccaccctagaaagtgacacatcctcctccagccctacttcccatgcaatgtataagcacttgtacaaaggaacacacaggcacacacaaacttacacacatgcttttttcttggatgaagattcttacacaccaacagtgagttcttcgaaaattacaatctaactgtatatcctggaatataagtggagccacactacagaccaaactgaggtccaggacctgtactttttgtacaatagaacccagctcttctactgttctgcagccagcagatggcagatctctgagcagaactgcttttgg

SEQ ID NO: 305 - protein, 67 aa, Homo sapiens [sequence omitted]

SEQ ID NO: 306 - DNA, 3892 bp, Homo sapiens
aaacaaactgagacaaaatgggaatacaacaatgtgggcattgacttgtcccctgagcccaaaagcttcaattacccattgctctcgtccccaggtgatcagcttgaaattcagctaaccgagcagctacggtccctcatccccaacgaggatgtgagaaagttcatgtctcatgttatctggaccttgaaaatggaatgttcagaaacacatgtgcaagggagctgtgccaagctcatgtcgcgaacaggcctcctgatgaagcttctcagcgagcagcaggaagcaaaggcattgaatgtagaatgggatacggaccaacaaaaaacaaattatattaatgagaacatggaacagaatgaacagaaagagcagaagtcaagtgagctcatgaaagaagttccaggatatgactataagaacaaactcatcttcgcaatatctgtgactgtcatactaataattttgattataattttttgttttatagaggtaaagacaataattaattcaggttttcaaaatacaatcctgtgtttgtgtggattcagaatccacaaactgaaaaccaacgtcactttcccacttgacattcttcttctgtcatttaaggctgaggtgtgctttgttcttttactgcaatgtatattccaggattgttaaaggatcctcgcttccaggaggtctctgtgaaataaaaccaagttaatcccactagactattttaagaagttaagttgatataatagcaaaatttctcccacccaaaactatgtcaacaattggatgtactcactgagtcaccccttactctgccactaatttatttccttgttgcttaaatgatgagagacatataatctccaccctcacggagttgtcatcaccctggagaggaagaagacagccaaaagagagaagtattgtcttgtagacttactagattcacatagtatcatccttctccagtgtgtaaggtgttgtctaaataggtccagttaaagaactacagggtagccatttttaaaaaaaaattttggccacgttttcaaattcacaggggagggggaatgtctcatactccagccctcctgagcctaggccctctgtgagatgtgtcaccatttcttggacaccatatgagacattccccctcggattagagatgctcaacctgcatcaacaaatctaaagcctgcatctggctaccctggggcgagtcctgtttacagtgcctattcctggagctcgcctctttttgccttttgtttgattatgtgatgtattacttttcccagcaggccagtgctagcatactggaagagggatttaataagctggcacccttgatgctatgctcctaatccaaccttatttgcctcattggccatttccattatggtggcagccctccattccagccacagcagcccctcagcgtcccccagtcacactgtccccattgctgctcatctgtgcctttgtccatctacaatgcccttatttcactctgcctgtgggagtcctgtgaatctctccaaagccaactcagttcatctttctgcttgaaaccttccctgaataggccaggtgcggtggctcacgcctgtaatcccagcactttgggaggccaaggcaggcggatcacaaggtcaggagatcgagaccatcctggctaacacagaccattctctactaaaaatgcaaaaaattagctgggtgtggtggcgggcgtgtgtcgtcccagctacttgtgaggctgaagcaggaaaatggcatgaacctgggaggtggagcatgcagccagccaagatcgggccgctgcactccagcctgggggacagagcgagactctgcctcaaaaaaaaaaaaaaaaagaaacttccctgaatattccagccctcctgagcctagtccctttgtgagatttgtccccatttcttggacaccatataagagacttcagaggctgaagtgggaggattgcttgagcctgggaggtcgaggatgcagtgagctgtggtcataccactgcactctagcctgggcaacagagcgagaccttgtctcaaaaacagccaccaccaaaaactatcttgggatttgaataggattaccttaaatttgtagattaatttgagaattgacatctgtacgacattctagaacatggtatttcatgtcatgtattcatttcttgttaatgtctttcagaagagttttagggtttccatcatatagatcttacacgtcttttgttagataacagatctttgtatttttgttcctaaatacttcagacatttgtattgccattgtaaatgggatctttcttccattttctagttagttattggtggtacatctgaaaagcatttgaggtttgtgtgctgctctcttgattttgtttctagccaccgtactgaattctcatattacttccagtaaaatcttagttgattctcttaggcttctttggctaacatttattattttatatgcaaataattatagttttgtctcttccttttcaatacttacactctttccttcctttcctttcttttttttttctttctcagggccttgttgtcacccagactggagagcaatggtgtgatctagctcgctgtaacctcaaactcctgggcttaggggatcctcctgcctcggcttcctgagtggctgggactacaggcaggcagtgaattttaaaacttttggtgtagagacaagatcttgctatgttgcccaggctggttttcctgccactttagagcaggtttcctttttttcatacttttaagaggtttttattaggaattgtccattgaatgttagctaaaacagtcaataaaatgcgttaagtaccagctacatgcaagaccctaagttagatacagtcagccctcttcatcagcaggtccacatcttcagattcaactagataaggctgaatatttgaagaaaaaaacaataaaaatacaattagaaagtacagtataacaactgttgccatgatacaatatctatacattttattagtgatgacctaaagttcatgggaccaggcacggtgactcacacttgtaatcccaacactttgggaggccagcctgggcagcatagtgagaccttgtctttaataaaaataaaaataaaaaaattagctagtgtggtggtatgcacctgtagtcccagctactcaagaggctgaggtgggcagatcactggagcccaggaggttgcggctgctgtgagctgtgattgtgacactgctctccagcctgagtgacagagggtgatcctgtctctaagtaagtaaataaataaagtatatgggggggatgtgtgttggttatatgcaaacactgcaccattatacgtaagggattgagcatccacagattctggtatggtgtggaggcgatatcctagaaccagtcgtctgcaaggtagcaaggatgactgaactgtggaagaatcaaagcactgttaaacagcatacaattcctgtcttcaaaaaagttatctcatcgggtagatgagacttaaaatgaataaaaggaatgaatacacattggagatagtggttgttgtgatagataaccttaattgtgttttcttccaaaacgggtgaattcacataaaagggcatcagaaaaatacaaagacaacccatcaatatcaggagcctgagcatgagttaaagcatgtggatggcctagagccatgtttttaaaattgttattaaatattggttttttacttaaatcaatgaaaactttctttactttgtggttgtgttcctcaaaatgagaatttttaacaataataaaaataaagcttattagatcaaaaaaaaaaaaaaaaagaaaaaaaaaaaaaaaaa

SEQ ID NO: 307 - protein, 220 aa, Homo sapiens
KQTETKWEYNNVGIDLSPEPKSFNYPLLSSPGDQLEIQLTEQLRSLIPNEDVRKFMSHVIWTLKMECSETHVQGSCAKLMSRTGLLMKLLSEQQEAKALNVEWDTDQQKTNYINENMEQNEQKEQKSSELMKEVPGYDYKNKLIFAISVTVILIILIIIFCFIEVKTIINSGFQNTILCLCGFRIHKLKTNVTFPLDILLLSFKAEVCFVLLLQCIFQDC

SEQ ID NO: 308 - DNA, 2492 bp, Homo sapiens
atatatgctgtaataatttaagtaaaattaccttcttttgtggaaatgtagaacagctgctcactgaaatggatatttcttcatatccttgaaaactgttgagtcacccttagtattctcttcttagatataataagttctaatttttccttacttggctcatttttaacccttttatctttttattattctgaaatctctccaaggccctcacatgtcctcaagttgtagagtcttaaattggacaacactttaattacagcctgaaggttaggtagttgttattccatttatatatcttagtatttgagtttacttttgaaatataaagtcttagtgactaatttagcatgtggttctctgccactcccttcctgaccacccaccacccctcattcttatcttctttttttaccttgtttgtacaaaaaccagttgttgcctattttatttcttctgtccataccctgtctgtctatgcatttaaaaacagagaactcattccttataaaacagacaaaccagggataattgtcaacatcaaaaaagaattctttaaatcactgcaggcttcctttaaataggtgtttcctgtggtggttttaagtgtttttatataggtcatcaactgcttgatataaagaaactaaagataaagggttaagaggcagtgccagttgaagaacagttagaaattgggataaaacagtagttcttaggtaaacagtaaaatacattcagattcacagaaaaaaaatatgtatatatatattttttgagatggagtctcacagtgttgtccaggctggagtgcagtggcgtgatctcagctcactgcaatctctgcctcccgggttcaagcgatcctcctgcctcagcttcccgagtagctgggactacaagcgtggcaccaccatacccggctaatttttgtatttttagtagagacggggtttcaccacgttggccaggctggtttcgaactcctgagctcaagtgatctgcctgcctcggcctcccaaagtgctgggattacaggtgtaagccactgtacctggcctgatttatgtattacttttcaagagaatgttataccaataatattttttgtctagatacagtgaacttttcatcatctgtactaatggaggcatgtacattttaattttgttatgcatttttgttgtaacatttaaatatagggatgtctaatcataaaatttaaaaatatttcataatttcatcatactgaagactcaggaagatctgaaaagaaacagaaagagtaccagacctggaatagaaacctgacttctaaaattggctatatagctagctataggaccttagttgaattgcttcaccattttaggcctgttttctgaactatacaatgagggatttcgactaaatgagggattttgaccaaatgatctctgaggtatcttaaatctctagctttttatgatttcccacccttgccaaggagttgagtaaacattggaggtgatgccaccaaaaaagtgaaagcacaatttttcctttatatgatggagtttgctgtagtgtagttttctctttcagaaatgaacgattatcctgattagattttgtttgcccacatcctgttatatcaagtcatgagtatacccccattgaaactcagagttgatttggtttacagttgttctaattgtatcctaagtcttctagctaaaattttaaaatgaagtagtcaccccatggcgttatttatttattttttgagagggaatcttgctctgtcgctcaggccagagtgcagtggtgtgatcttggctcactgcaacctgtgcctcccgggttcgagcgattctcctgcctcagcctccagagtagctgggactacaggggcatgccaccacgcccggctaatttttgtatttttagtagaagcggggtttcaccatattggccaggctggtctcaaactcctgaccgtatgatctgcccacctcgacctcccaaagtgctgggattgattacaggtgtgagccactacgcccagcccccatggagctatttttatttaaaacacatacattataactctattgatctgattacaaaagtgcctattttgttaaaatgttttattgtgataaaaattcaaaaattattaatgttagccaacaaaattcaagcaaaacataaatgtgtaaagtaaaaagtgaaagatttttccttagtccctctcaccactcccattctccaagaataacttaatttggtgtgtgtcttcccagatgttgttctgtttgtgtttatatattaatatacacatatatacatatatgaatacccacacatttgtatataggttttttttaaatgaaatgggatattatatgtactgttttgcaacttttttcactttgcattgtattctggacctcctcttgcattaatacatggaaatttacctcatttaaaaaatgactgcataacatttc

SEQ ID NO: 309 - protein, 103 aa, Homo sapiens
MPPRPANFCIFSRSGVSPYWPGWSQTPDRMICPPRPPKVLGLITGVSHYAQPPWSYFYLKHIHYNSIDLITKVPILLKCFIVIKIQKLLMLANKIQAKHKCVK

SEQ ID NO: 310 - DNA, 2985 bp, Homo sapiens
ctaaagcagaccgcgggttaggggcttcatctctctgcgttctcagttgtgggaggccttggtgattcggccacagcctcagcctccgtcgctctgtgacctgcgggtattggatgattggtagctaagactcccgaatacttcagaagtggggaaatggaactcttaacattcagggatgtggccatagaattctctccagaagagtggaaatgcctggaccctgaccagcagaatttgtatagagatgtgatgttggagaactacaggaacctggtctccctgggtgttgctatctctaacccagacctggtcacctgtctggagcaaagaaaagagccctacaatgtgaagatacataagatcgtagccagacccccagctatgtgttctcatttcacccaagaccattggccagtgcagggcatagaagattcattccacaaacttatactgagaagatatgagaaatgtggacatgataatttacaattaagaaaaggctgtaaaagtttgaatgagtgtaagttgcagaaaggaggttataatgaatttaatgaatgcttgtcaactacccagagcaaaatacttcagtgtaaagcaagtgtcaaagttgttagtaaattttcaaattcaaacaaacgtaagacaagacatactggagagaaacactttaaagaatgtggcaaatcatttcagaagttttcacacctaactcaacataaggtaattcatgctggagagaaaccctacacttgtgaagaatgtggcaaagcctttaaatggtctttaatatttaatgaacataagagaattcatactggagagaaaccttttacttgtgaagaatgtggcagcatctttaccacatcctcacactttgctaagcataaaataattcatactggagaaaaaccctataaatgtgaagaatgtggcaaagcctttaataggttcacaacccttactaaacataagagaattcatgctggagagaaacccatcacatgtgaagaatgtaggaaaatctttacctcatcctcaaactttgccaaacataagcgaattcatactggagagaaaccctacaaatgtgaagaatgtggcaaagcctttaataggtccacaacccttactaaacataagagaattcatactggagagaaaccctacacatgtgaagaatgtggcaaagcttttagacagtcctcaaaactgaatgaacataagaaagttcatactggagagcggccctacaaatgtgatgaatgtggcaaagcctttggacggtccagggtcctgaatgaacataaaaaaattcatactggagagaaaccctacaaatgtgaagaatgtggcaaagcctttagacggtccacagatcggagtcaacataagaaaattcatagtgcagataaaccctacaaatgtaaagaatgtgacaaagcctttaaacaattttcgctcctgagtcaacataagaaaattcatactgtagataaaccctacaaatgtaaagattgtgacaaagcctttaaacggttctcacacctgaataaacataagaaaattcatacttgagagaaatcctacaaatgtaaagaatgtggcaaacctttggatgatccacaaaccttaatgaacatgagaaaatttatactgtagagaaaccctggaaatgtgaagaacgtggcaaagttctttacctcattctcaaaccttgataaacataagagaattcataccggagagaaactgtacaaatgtgaagaatatgcaaagcctgtgaatggtccacaaacctgaatgagcagaagaaaattattactggagataaaccctgcaaatgtaaagagtgtaacaaaacctttaaacagccctcaccggtgaataaacataagaaaaatcatgctggagggaagccctacacatgtggcagaatgtggcaaagcatttaattggtcctcaatgcttaataaatataattcatgctggagagaaacttcacatgtgaaccgtgtgcaaagcctttaaatggtcctcaacccttaatgaacgtaagtgaattcatgctggagcaaaaatgcttcacatgcgaagaatgtggcacagtctttaccacatcctcaaactttgttaaacataagagaatttataccagagagaaaccctacacatgtaaagaagtgtgcaaagccttcaataggttctcaacccttactgtgcacaagataattcattctggggaaaaaaatgctacaaatgtgaaaaacgtggcagagccttcagaccatccacaaacctttatgaaaattcatatttgagagtagaagaatcattccacaaacttacattgagaagatatgaaagatgaatataagaattcatcctagatataaaaccatagaaatgtaaaagatgtgacaaaacctttaagccatactccaggcttcttaaacataatgagaactcatactggaggaaagtcttacaaatgtgaagaatgtggcagtctttaaatcttcctcagtcttttctaaatcatgaagataattcacactgaagagaaactgcaaacgtggagaagtgtgacaaagcttgcaaccacactcaatctattctaaatataagagaaagtatattggtgagaagccaccaaaaatattgaaaaatgtgcaaagccttcaaatgcttgtcacatcttactgtatatatataattcctactgaagaaatcccctggaaatgcaaaaaatgtggcaggatttttaccaatgctcatctttttgcacatgatatcctttatattcgagaaaagttatagaaatataaaaaatatagaaaagtcatatctcctcacattttactaactagcaatgttcatacttaataaaaacattataaatgtaatttctgttgaaagacttcagaaaatataggcctttaaagtgaagaagagtattcttaagacaacaatacactttag

SEQ ID NO: 311 - protein, 474 aa, Homo sapiens
MELLTFRDVAIEFSPEEWKCLDPDQQNLYRDVMLENYRNLVSLGVAISNPDLVTCLEQRKEPYNVKIHKIVARPPAMCSHFTQDHWPVQGIEDSFHKLILRRYEKCGHDNLQLRKGCKSLNECKLQKGGYNEFNECLSTTQSKILQCKASVKVVSKFSNSNKRKTRHTGEKHFKECGKSFQKFSHLTQHKVIHAGEKPYTCEECGKAFKWSLIFNEHKRIHTGEKPFTCEECGSIFTTSSHFAKHKIIHTGEKPYKCEECGKAFNRFTTLTKHKRIHAGEKPITCEECRKIFTSSSNFAKHKRIHTGEKPYKCEECGKAFNRSTTLTKHKRIHTGEKPYTCEECGKAFRQSSKLNEHKKVHTGERPYKCDECGKAFGRSRVLNEHKKIHTGEKPYKCEECGKAFRRSTDRSQHKKIHSADKPYKCKECDKAFKQFSLLSQHKKIHTVDKPYKCKDCDKAFKRFSHLNKHKKIHT

SEQ ID NO: 312 - DNA, 540 bp, Homo sapiens
attgcatattgttttaatgataaatataaacacagtaaaactattaagagatacataggaattataatctcacattcagaataggttactgctaatgtggtggaaggtggagaaaagaaaggagaaacagttatctatactctcttccacggttacctagcttcaacaacaactttcaaaattctgttgtatacacttcagtgtttcttctgtgtgtgaatacatgcaatatatacacaaacatacggcttcctttttcacccaggatgaaatctgagagccctggaagagttgacgccaggccctctgacctcctttccaactacttcttcccacccacaccctcctggatgacctcctcccaccctggagcatgctaaaacagtccaagaccttctgcaattactcctctgcctgcaacactcttccctgtttcatatctgactgttttaccagtaagatgtcattccaatgtcacctcacaggagaggccttccttgaccatcccatatagaataaccctttcatcctctactcatt

SEQ ID NO: 313 - protein, 46 aa, Homo sapiens
MLKQSKTFCNYSSACNTLPCFISDCFTSKMSFQCHLTGEAFLDHPI

SEQ ID NO: 314 - DNA, 500 bp, Homo sapiens
cctgcgaaaagattggaggcctctcattcccagccagtttaatactccgaccctccttttccagagtctgtcatgccctcctgggcagccccttctccaagtgtcagctgtcctgacctggccagtcctcatctatcagtgaccagacatatggtgcaagcaggtctccagcaaaactttcctcaactccagcacagccagtgtcttgcactcgattttcaatttcaccttgtggagcttggccatggaacaaaagacaggaacaagtgatgctattactaaatggaaggagtgttggaagagttaattgatgaaattaactcctcttcctcctccaacagtgcaggagcaagtatctgcttagtgtgatcatacatacacgcttctcttcacaagcttatacctctgggactcagagagtgaaactcagaaagcaaggtccacacgtgccaccgccaccctttaaggcaggtctcacaacaacctctctcatgcatcct

SEQ ID NO: 315 - protein, 65 aa, Homo sapiens [sequence omitted]

SEQ ID NO: 316 - DNA, 468 bp, Homo sapiens
agagacggggctttgccatgttgaccaggctggactcaaactcctgacctcaggtgatccgcccacctcggcctcccaaagcactgggattacaggaatgagccactgcactcggcctacttctgcattccttagagtacatcctagctaggatatattcacttgtctttagagctaacagcagaagaaaggtacctagatgcttatctagctctttatctttctagaaattctagaagatgagaggggcagtggtggctccaagggagtgattttaggatggactgggacagagaggggctgcttacacatactcacacagaggccattaatttagggagttcaaggtccaggaggttgacggcatctaggcctgtggcagagtgcactcctgctttggggaatgtatgggcagcttcttgcctgtagttggagggttagagagagggatcaataatttcatggttg

SEQ ID NO: 317 - protein, 49 aa, Homo sapiens [sequence omitted]

SEQ ID NO: 318 - DNA, 490 bp, Homo sapiens
tttttttttttttttttaatatacaaaagtcaactgtgtttcaatttaataaatttaaaaaataaaaatttaaaacagctctcatattattgagtgaaagacacaaatacatactaatgagtccatatatataaagctcaaaagcaggggaaacaataccgccgtgttaacactaccgtacttaagtttgaggaggagggaatgatagaggtttagcagggacatgaggtggacttttgacttgggtagctgttcaatgttatatatatgggaaaacatgtgttgtgcacttttctacatgtgtatattcttcacaatattttaaataaataaagcaagcaactatgtattagcagatagaaaaatgataaagtgatagatctaatacctggttatttaaaataaataaatagataaacttctggctgatttaaagcagaataaaaagtgaaaaagtcaattacataaaataggaaaatataatttacgg

SEQ ID NO: 319 - protein, 33 aa, Homo sapiens
MRWTFDLGSCSMLYIWENMCCALFYMCIFFTIF

SEQ ID NO: 320 - DNA, 449 bp, Homo sapiens
ttcattaaaaaaatgggggtgggggcaagggtcctgagaactcagagatgagcctgtttacacaccagtcccagaaaagcctacagaaaacctggggaacaccacactgaccactgagaccataaaagccccagtaaagtccacagaaaacccagaaaaaacagcagcagtcacaaagactataaaaccttcagtcaaggtcacaggagacaaatctctcactactacctcttctcatctaaataaaactgaagttactcatcaggtgcccactggttctttcaccctcattacatctagaacgaagctgagttctatcacatcagaagccacaggaaacgagagccatccatacctcaataaagatggctcacagaaaggtatccacgctggacagatgggagagaatgattcattccctgcatgggccatagttattgtggtcctgg

SEQ ID NO: 321 - protein, 235 aa, Homo sapiens
MTQVTEKSTEHPEKTTSTTEKTTRTPEKPTLYSEKTICTKGKNTPVPEKPTENLGNTTLTTETIKAPVKSTENPEKTAAVTKTIKPSVKVTGDKSLTTTSSHLNKTEVTHQVPTGSFTLITSRTKLSSITSEATGNESHPYLNKDGSQKGIHAGQMGENDSFPAWAIVIVVLVAVILLLVFLGLIFLVSYMMRTRRTLTQNTQYNDAEDEGGPNSYPVYLMEQQNLGMGQIPSPR

SEQ ID NO: 322 - DNA, 419 bp, Homo sapiens
ttccctcacactccctctcctcaaacaaacatttcgggattcactggcacttgcaggttgttaggaaccggtcttgattttataagacacctttcaaaacataatcccggtgcggcgtgtaaggtgtgggaaccgtttagtcacagacaccgtcccgtctacctcccccgagtccagccttgggtgggtgctgcacagcgacttgcggccttaggtcttctcgctgtgccttcctttcctcctgagagatgctctccgcctaagaccgctaacagctcaattgggtctcattgatcccactcaccatctagagccctgttgcctcattaatccgttgtgccaccagctcacgggctgcaactgggaagagacgagacctgtttatccatcgccgacactgggatacgcagcaatctgca

SEQ ID NO: 323 - protein, 97 aa, Homo sapiens [sequence omitted]

SEQ ID NO: 324 - DNA, 573 bp, Homo sapiens
  misc_feature (475)..(475): n = unknown
tttgtttttgttgcctacccccaatccccaacccctgcagtgctttgattatgagaaagttctgcatgacttagcataactgctcttttctaaaagcctctgcaattagatccaaagggttggggtttggaccatgccaggttttgctgaggaattgggggatcggttacagaattatgggaaggttgtttgactttcaaatcttcacttatcccctgcgatacatttggcttcatgactgtttactgtgtggcttggttgctagcgcactctatctaggttaagatattgcttcctttcttcaaattcttgccatgtgctgattaattcttctgtttttaatttttcttttccctggattaattgccatttcagagtttgcatgaaaccatataacactattgagaagtttttggggaaggctatcggtcatttgaggattttgcctaccataagcatgcatcttttctaccgngaatcacgaggactctactggactgagttcagtggctgagacaaaattacaatagccaataacagtaacagcagcagcagccacaggttatcaagctg

SEQ ID NO: 325 - protein, 43 aa, Homo sapiens
MKPYNTIEKFLGKAIGHLRILPTISMHLFYRESRGLYWTEFSG

SEQ ID NO: 326 - DNA, 2351 bp, Homo sapiens
gatgccaaaattacttttttccttccaaatatcaccttctgactgtttccaccatggttaagagggctgaataagatgatcattctttagatgacgaattaacccttgcttcttcgaaaggttttagggaaattaacaaaaaaattcccagatgccaacagccaccattcaaaagaccaccaatctattgcatcataccagatgccactctctcttcctagtagggatttctctcctcggtcctgatcaaggtgttataatagagacattttcattatagacagtgtcctgaagggattccagctcaaatataggaattcttaaacctagctgaaactcccaaagtgatttcattgctgggcatattttaacatacttaggggaaagcaaatctttaaacaaagcaaaacaccaaactacagttttaaaaagaagaaaggagagcgtattttagtttcaaaattacattacattttaatttaattttccttctaattttcctgtcagcattttatttacaaaaactgtgcagcaaacgagggaaaatcttccaacacaaacaactctgtaatgactaaattggttttattcatatattttagacatttggttaacttggatctttttcataagttctttgtgatgctttgtaaggttagtgtaactgaagtgtttgtgagtttgatttggtcccacagtgcttaattcagtggatattttgctagaagttttaatgtaaacttgggtggttaactgactattaagtgtaacctattgtgatttctaagaggagtcctgccaagaactgtatgtccaaaactgatctgttttaacagttagtgaggaacagcttccgagataaagtaagttcatttttctattgctaattttgctttttaaaatagcagtgttgtaagactaatatttccacttaccaccaatagagggagcattaattaactatgtcatggaattgttttgatattttggaaaacaagtgattccacccataaaatgaaaagagaagattgaccttaagaaaaaaactcttaaagctaggagacaatgacatgaaatcactcaatacatgttacaaatgaaagaaggccaaaagccactttaaaatattttaaactgtttcacagtagatttgaaagtgtctttgttcaaatttagcaaagtaggaagaattttcactaataccgcctgaaaagttgatcttaggtgccattatgggccacgtgtagctttctgtttctcaaatctgagagagacccatttgccttaatgctgatttgccatgtaaaatgctaagcaattgggttagaatccaccttttcttttggtagaacatgtagagaaaaagctgcaggtgacttgaaaccctgaggcgtctatcatcctttccctgtaaaggaagtgtctcttaaaaaaaagggagtgggggaggaggtggaggatccctaaagaattcttaatgaggtgatataatcattgtagtccatgacaaaatggaccagccaggtttgcatagcagtagacatattcctactgtacatttatccttcccaaatatgtcacattctaaaatagttgacaaattattttgtggaaagaggaagaagctggattggagtgggagatctaatctggaggagcaaagaggtagttgtttattgctatgttcctggcccatcaaatggccactttccaaactgacccacattttaggaaataaaccaatctggacctgtttcaaaaggatagagatgcttttagattgtcaattctcacttttaagttaaacaatcacaaatatctttagaaatagggaaagacatttgcttcaaaatcaaagaatgagtgtggatctttttaatttttttttgtttcaagtcctacagtcatcttacatttagaccttcatggtagggtgatatgagtgctaaaaaaatttctttctagtagccaggaaacagatagataagataaaagcaaatgttccagatttaagacttcttaggatgagtacaaggaagagagaaatagtatggaaaggacattttttagcaatttataattttaaaatggaatttgccaaacaagggagaggaaaaaaagtcaaaggggaatttttatctcaagatatttagatatggtttataaaaaaataatattttctaccactaaaaacactggtattatctcagcatcatgggcaatttttccttattacatgccaatatttgtacaaaaagggcccccaaatgtgtgaaatataatcctaaaaaagaaaataattggaacacatggatctgttacaattctacacagggggaaacaagctaagc

SEQ ID NO: 327 - protein, 97 aa, Homo sapiens
MDQPGLHSSRHIPTVHLSFPNMSHSKIVDKLFCGKRKKLDWSGRSNLEEQRGSCLLLCSWPIKWPLSKLTHILGNKPIWTCFKRIEMLLDCQFSLLS

SEQ ID NO: 328 - DNA, 400 bp, Homo sapiens
gcggccgcgcctgcctgccccacctcgtaagggcctgtgacctcacgaggccagccgccgggcgctgcattcgagcggtggggctcctgtccgtgcgctttcctcccgcagccccggccgggattccgcccttcgtccttgccacccgctcgccactcttccctaatcgctgttcattctccggtgcgctgtcccgccatggtctgaccccacttcaatcttaccttcggtccgtcctttgaacaccccgacccccgacccctttcttccaaaacattccatccttcttggcttctgctactcaataatggacagcagctcgaaggccatgtatcccacggctttgctgaaatttgtctcgggttgcctttaagagactggtcgtttccttttgaagaga

SEQ ID NO: 329 - protein, 79 aa, Homo sapiens [sequence omitted]

SEQ ID NO: 330 - DNA, 1618 bp, Homo sapiens
gattgatttccaccatcaacacctttacctcttcccgcctgaaaataaaagatgaaatataacaagtaaatcgcaatctaccttgcacagaatcttctggagaggaaagaagaaaccatgtctagacaagatgctggaaagacccagggaagacacagatatgtgtgcctttattagcggagccactacttgagggagatgaagcgggaggagtgggtggacccaatgccaggccggccgtgcttcacgggcttgtaggtgatggagaactcgcccaggtcgtggccgatcatctccagcttgatctccacctggttgaaggtcttgccgttgtagacgcccaccctgctgcccaccatcttgggagggatgatcatatcgcgcaggtgcgtcttcaccacttcctgcttctctatggtcggcgcctccttcttggcctagcataggcgcctcagcagcgaatgcggcttgagcctcagcattccgccacaggccgtggttcagccgccgcagctggcgcgcgccgtacagctgcctcagctgctcaaaggacatgtccagcagctggcccaggtccacaccgcggtaggtgaacttgcggaagatccgctgcttcttctcctctacctctgccatcttgccggatcctctgaaaatgattccgtaagtgccagagtccttcacatatggattttaacctaattctgtaatgattttaattagctgatatattaaaaacaacgtcagtaagtttttcccttcaaggaagcctcaactttgagaaacggtgaattacgtgaggtgaacctcgtatttatgtgaggaaagctctgcactggttttgattctcacattttaattagctgatacattaaaaacaatataagtaatttttcccttccgggaaacctcaacttggagtaacgctggattacgtgagctaaacctcgtaattatgtgagaaaggctaagtattggttttgtttcccacatttacgtgaggaaattgaggcacaatgttaagtgtcacaaggtcaagtaactagtaaggggcaggccaagatagaaatctgtttgcagaactcttgtgcttaatgactaagaagcgtgcgcagatgcaagggccagacagggaaacaagagatccatttgtaccaatagcatggaagattgactttgtttcagggaatcgcgttttttcataaaaacttcgggattaacccacctcacatattttctccaaagttatagttatgtattggatttaagaatagactgaacctgggctccccactgcacaagataaaaaactgatagaggctgggcacggtggctcacgcctgtattcccagcactttgggagaccaaggtaggcggatcacctgaggtcagaagtttgagactatcctgggcaacatggtgaaaccctaactctactaaaaatacaaaatcagctgggtgtggtggtgggtacctgtaatcccagctactcgggaagttgaggcaggaaaatcgcttgaacctggaggcagaggttgcggtgagccaagatggcgccactgcactccagcctgggtgacagagcgagaccccgtcaccaaaaaaaaaaaaaaaaaaa

SEQ ID NO: 331 - protein, 43 aa, Homo sapiens
MRLEPQHSATGRGSAAAAGARRTAASAAQRTCPAAGPGPHRGR

SEQ ID NO: 332 - DNA, 3673 bp, Homo sapiens
gacgggctggggaggtggtgccaggctggttgctagctgccgccgctgctcaccccggccgtccggccgcttcattgtcaccgggcctcggggcagtgttgggggtggcggggcgccaggtcgccgacccgaggtttcggcgcgactggttccgcatcccctccccgccggccgaatctgcaggccccgcgcgccaggcaggcttcgcggctgcgcccccggcccgcgcaggacctgccttgtccaccatgaaaggcacccgggccatcggcagcgtcccggagcgcagcccagcaggtgtggacctgagtctgacaggtctccctccgcctgtgtcccggcgtcctggcagtgccgccaccaccaagcccatcgtccgctctgtctccgtggtcacaggcagcgagcagaagaggaaggtgctggaggccacagggcctgggggctcccaggccatcaacaaccttagaagatccaacagcaccacgcaggtcagccagcctcggagcggctcccccaggccaacggagcccacagacttcctgatgctcttcgagggcagccccagtgggaaaaagaggcctgccagcctgagcacagcccccagcgagaagggagccacctggaacgtcctggatgaccagccccggggcttcaccttgccatccaatgcccggagttccagtgcccttgactcaccagcgggcccgcggaggaaagaatgcaccgtggccctggcccccaacttcactgctaacaacaggagcaacaagggagcagtgggcaactgcgtcaccaccatggtgcacaaccgctacaccccctcggagagggcgcctccgctcaagagctccaaccagactgccccctccctcaacaacatcatcaaggcagccacctgtgagggcagtgagagcagcggctttgggaagctgccgaagaatgtctccagtgccacccactcagcccggaacaatactgggggcagcacgggcttgcccaggcggaaggaggtgacggaggaggaggctgagaggtttatccaccaggtgaaccaggccgctgtcaccatccagcgctggtaccggcaccaggtgcagcggcgcggagcaggagctgcccgcctggagcacttgcttcaggccaagcgggaggagcagcggcagcggtcaggcgaggggaccctcttggacctgcaccagcagaaagaggcagccaggaggaaggcccgggaggagaaggcacgccaagccaggcgagcagccattcaggagctgcaacagaaacgagccctgagagcccagaaggcgagcactgccgagcgtgggccacctgagaatcccagggagaccagagtgccaggaatgcggcagcctgctcaggagctgtcccccacgccaggcggcactgcccaccaggccctcaaggccaacaatgctggtggtggcctccctgctgcaggccccggagaccgctgcctgcccacctccgactcatccccagaaccacagcagcctccagaggacaggacgcaggacgttcttgcccaggatgcagctggggacaacctggagatgatggccccgagcagggggagcgccaagtccagggggccactggaggagctgctgcacacactgcagctgctggagaaggagccggacgcgctgccccgccccaggacccatcacaggggcagatacgcctgggccagcgaggtgaccacggaggatgacgccagctctctgacagctgacaacttggagaaatttggaaaactcagtgcgttccccgaacctcctgaggatgggacgctgctatcggaggccaagctacaaagcatcatgagcttcttggacgagatggagaagtctgggcaggaccagctggactcccagcaggaggggtgggtgccggaggcggggccggggcccctggagctggggtccgaggtgagcacgtctgtgatgcggctgaagctggaggtggaggagaagaagcaggccatgctgctgctgcagagagcgctggcgcagcagcgagacctcacggcccggcgggtcaaggagacagagaaggcactgagccggcagctgcagcggcagagggagcactacgaggccaccatccagcggcacttggccttcattgaccagctgattgaggacaagaaggtcctgagtgaaaagtgcgaggctgtggtggccgagctgaagcaggaggaccagagatgcaccgagcgtgtggcccaggcacaggcgcagcacgagctggagattaaaaaactcaaagaattaatgagcgccaccgagaaagcccgccgggagaagtggatcagtgagaaaaccaagaagatcaaggaggtcactgtccgaggtctggagcccgagatccagaagctgattgcaaggcacaagcaggaagtgcggaggctcaagagcctgcacgaggcggagctgctgcagtcggatgagcgggcctcgcagcgctgcctgcgccaggccgaggagctgcgggagcagctggagcgggagaaggaggcgctgggccagcaggagcgcgaacgtgctcggcagcggttccagcagcacctggagcaggagcagtgggcgctgcagcagcaacggcagcggctgtacagtgaggtggctgaggagagggagcggctgggccagcaggcagccaggcagcgggcggagctggaagagctgaggcagcagctggaggagagcagctctgcactgacccgagccctgagggctgagtttgagaagggcagggaggagcaggagcgccggcaccagatggagctgaataccctgaagcagcagctggagctggagaggcaggcgtgggaggccggccgcaccaggaaggaggaggcgtggctgctgaaccgggaacaggagctgagggaagaaatccggaaaggccgggacaaggagattgagctggtcattcaccggctggaggccgacatggcgctggccaaggaggagagtgagaaggctgccgagagccgcatcaagcgcttacgggacaagtacgaggccgagctctccgagctggagcagtcggagcggaagcttcaggagcggtgctcggagctgaagggccagcttggggaggccgagggcgagaatctgcgtctgcagggccttgtgcggcagaaggagcgggcgctggaggatgcgcaggcggtgaacgagcagctttctagcgagcgcagcaacctggcccaggtgatccgccaggagttcgaggaccggctggcagcctctgaggaggagacgcggcaggccaaggccgagctggccacgctgcaggcccgccagcagctggagctggaggaggtgcaccggagggtgaagacagccctcgcgaggaaggaggaggccgtgagcagcctccggacacaacatgaggctgcggtgaagcgggccgaccacctggaggagctgctggagcagcacaggaggcccacgccaagtaccaagtgaccagggatgccgggaacactgtcgaagaacggaaggcagaggacagaggctggacgtgggcccagaggcccacagggacgcccacctgccccccacagaggctggtggttgagatgcccacggctaagcacctgtggctgcattttaacagtaaaggaggccgttgttttcag

SEQ ID NO: 333 - protein, 1165 aa, Homo sapiens
RAGEVVPGWLLAAAAAHPGRPAASLSPGLGAVLGVAGRQVADPRFRRDWFRIPSPPAESAGPARQAGFAAAPPARAGPALSTMKGTRAIGSVPERSPAGVDLSLTGLPPPVSRRPGSAATTKPIVRSVSVVTGSEQKRKVLEATGPGGSQAINNLRRSNSTTQVSQPRSGSPRPTEPTDFLMLFEGSPSGKKRPASLSTAPSEKGATWNVLDDQPRGFTLPSNARSSSALDSPAGPRRKECTVALAPNFTANNRSNKGAVGNCVTTMVHNRYTPSERAPPLKSSNQTAPSLNNIIKAATCEGSESSGFGKLPKNVSSATHSARNNTGGSTGLPRRKEVTEEEAERFIHQVNQAAVTIQRWYRHQVQRRGAGAARLEHLLQAKREEQRQRSGEGTLLDLHQQKEAARRKAREEKARQARRAAIQELQQKRALRAQKASTAERGPPENPRETRVPGMRQPAQELSPTPGGTAHQALKANNAGGGLPAAGPGDRCLPTSDSSPEPQQPPEDRTQDVLAQDAAGDNLEMMAPSRGSAKSRGPLEELLHTLQLLEKEPDALPRPRTHHRGRYAWASEVTTEDDASSLTADNLEKFGKLSAFPEPPEDGTLLSEAKLQSIMSFLDEMEKSGQDQLDSQQEGWVPEAGPGPLELGSEVSTSVMRLKLEVEEKKQAMLLLQRALAQQRDLTARRVKETEKALSRQLQRQREHYEATIQRHLAFIDQLIEDKKVLSEKCEAVVAELKQEDQRCTERVAQAQAQHELEIKKLKELMSATEKARREKWISEKTKKIKEVTVRGLEPEIQKLIARHKQEVRRLKSLHEAELLQSDERASQRCLRQAEELREQLEREKEALGQQERERARQRFQQHLEQEQWALQQQRQRLYSEVAEERERLGQQAARQRAELEELRQQLEESSSALTRALRAEFEKGREEQERRHQMELNTLKQQLELERQAWEAGRTRKEEAWLLNREQELREEIRKGRDKEIELVIHRLEADMALAKEESEKAAESRIKRLRDKYEAELSELEQSERKLQERCSELKGQLGEAEGENLRLQGLVRQKERALEDAQAVNEQLSSERSNLAQVIRQEFEDRLAASEEETRQAKAELATLQARQQLELEEVHRRVKTALARKEEAVSSLRTQHEAAVKRADHLEELLEQHRRPTPSTK

SEQ ID NO: 334 - DNA, 1183 bp, Homo sapiens
ggcacgagccacgattcagtcccctggactgtagataaagaccctttcttgccaggtgctgagacaaccacactatgagaggcactccaggagacgctgatggtggaggaagggccgtctatcaatcaatgtgtaaacctattactgggactattaatgatttgaatcagcaagtgtggacccttcagggtcagaaccttgtggcagttccacgaagtgacagtgtgaccccagtcactgttgctgttatcacatgcaagtatccagaggctcttgagcaaggcagaggggatcccatttatttgggaatccagaatccagaaatgtgtttgtattgtgagaaggttggagaacagcccacattgcagctaaaagagcagaagatcatggatctgtatggccaacccgagcccgtgaaacccttccttttctaccgtgccaagactggtaggacctccacccttgagtctgtggccttcccggactggttcattgcctcctccaagagagaccagcccatcattctgacttcagaacttgggaagtcatacaacactgcctttgaattaaatataaatgactgaactcagcctagaggtggcagcttggtctttgtcttaaagtttctggttcccaatgtgttttcgtctacattttcttagtgtcattttcacgctggtgctgagacaggggcaaggctgctgttatcatctcattttataatgaagaagaagcaattacttcatagcaactgaagaacaggatgtggcctcagaagcaggagagctgggtggtataaggctgtcctctcaagctggtgctgtgtaggccacaaggcatctgcatgagtgactttaagactcaaagaccaaacactgagctttcttctaggggtgggtatgaagatgcttcagagctcatgcgcgttacccacgatggcatgactagcacagagctgatctctgtttctgttttgctttattccctcttgggatgatatcatccagtctttatatgttgccaatatacctcattgtgtgtaatagaaccttcttagcattaagaccttgtaaacaaaaataattcttgtgttaagttaaatcatttttgtcctaattgtaatgtgtaatcttaaagttaaataaactttgtgtatttatataataaaaaaaaaaaaaaaaaa

SEQ ID NO: 335 - protein, 169 aa, Homo sapiens
MRGTPGDADGGGRAVYQSMCKPITGTINDLNQQVWTLQGQNLVAVPRSDSVTPVTVAVITCKYPEALEQGRGDPIYLGIQNPEMCLYCEKVGEQPTLQLKEQKIMDLYGQPEPVKPFLFYRAKTGRTSTLESVAFPDWFIASSKRDQPIILTSELGKSYNTAFELNIND

SEQ ID NO: 336 - DNA, 129 bp, Homo sapiens
tatacggctgcgagaagacgacagaagggatacacaaccagatatttccaggaaggaaagtggaaagccctgctaacaggtatagtcttaagggagacaaaaaaaaaaaaaaaaaaaaaaaagtcgtat

SEQ ID NO: 337 - protein, 42 aa, Homo sapiens
YGCEKTTEGIHNQIFPGRKVESPANRYSLKGDKKKKKKKKVV

SEQ ID NO: 338 - DNA, 694 bp, Homo sapiens
ggagaggccgggctggccagagtcttcggcctccggcgtcgggaaatggcggcggggggggggatggagtgacggttccttggatatcacccagagtattgaagacgacccacttctggatgcccagcttctcccacaccactcattacaagctcactttagaccccgattccatcctcttcctacagtcatcatagtgaatctgctgtggtttattcatctcgtgtgagttgtttagcatttttaacaggtgtgctttgttcttatcctaatccaaatgaggacaagtgcccaggaaattacacaaacccattgaaagttcagacggttataatccttgggaaagttattttgtggattctccatttactccttgaatgctacatccagtatcaccacagcaaaatcagaaaccgaggctataacttgatctaccgatcaacaaggcatctcaagagacttgcgttgatgatacagtcctctggcaacacagtgcttctcctcatactgtgcatgcagcactccttcccagagcctggcagattgtatcttgacctcattctggccatcttggcactggaactcatctgttccctgatatgtctcctcatttacacagtgaaaatccggagatttaataaagctaaaccagagcctgatatacttgacgaagacaacatctatgcttacccca

SEQ ID NO: 339 - protein, 127 aa, Homo sapiens
LKVQTVIILGKVILWILHLLLECYIQYHHSKIRNRGYNLIYRSTRHLKRLALMIQSSGNTVLLLILCMQHSFPEPGRLYLDLILAILALELICSLICLLIYTVKIRRFNKAKPEPDILDEDNIYAYP

SEQ ID NO: 340 - DNA, 2974 bp, Homo sapiens
ctcagggcagagggaggaaggacagcagaccagacagtcacagcagccttgacaaaacgttcctggaactcaagctcttctccacagaggaggacagagcagacagcagagaccatggagtctccctcggcccctccccacagatggtgcatcccctggcagaggctcctgctcacagcctcacttctaaccttctggaacccgcccaccactgccaagctcactattgaatccacgccgttcaatgtcgcagaggggaaggaggtgcttctacttgtccacaatctgccccagcatctttttggctacagctggtacaaaggtgaaagagtggatggcaaccgtcaaattataggatatgtaataggaactcaacaagctaccccagggcccgcatacagtggtcgagagataatataccccaatgcatccctgctgatccagaacatcatccagaatgacacaggattctacaccctacacgtcataaagtcagatcttgtgaatgaagaagcaactggccagttccgggtatacccggagctgcccaagccctccatctccagcaacaactccaaacccgtggaggacaaggatgctgtggccttcacctgtgaacctgagactcaggacgcaacctacctgtggtgggtaaacaatcagagcctcccggtcagtcccaggctgcagctgtccaatggcaacaggaccctcactctattcaatgtcacaagaaatgacacagcaagctacaaatgtgaaacccagaacccagtgagtgccaggcgcagtgattcagtcatcctgaatgtcctctatggcccggatgcccccaccatttcccctctaaacacatcttacagatcaggggaaaatctgaacctctcctgccacgcagcctctaacccacctgcacagtactcttggtttgtcaatgggactttccagcaatccacccaagagctctttatccccaacatcactgtgaataatagtggatcctatacgtgccaagcccataactcagacactggcctcaataggaccacagtcacgacgatcacagtctatgcagagccacccaaacccttcatcaccagcaacaactccaaccccgtggaggatgaggatgctgtagccttaacctgtgaacctgagattcagaacacaacctacctgtggtgggtaaataatcagagcctcccggtcagtcccaggctgcagctgtccaatgacaacaggaccctcactctactcagtgtcacaaggaatgatgtaggaccctatgagtgtggaatccagaacgaattaagtgttgaccacagcgacccagtcatcctgaatgtcctctatggcccagacgaccccaccatttccccctcatacacctattaccgtccaggggtgaacctcagcctctcctgccatgcagcctctaacccacctgcacagtattcttggctgattgatgggaacatccagcaacacacacaagagctctttatctccaacatcactgagaagaacagcggactctatacctgccaggccaataactcagccagtggccacagcaggactacagtcaagacaatcacagtctctgcggagctgcccaagccctccatctccagcaacaactccaaacccgtggaggacaaggatgctgtggccttcacctgtgaacctgaggctcagaacacaacctacctgtggtgggtaaatggtcagagcctcccagtcagtcccaggctgcagctgtccaatggcaacaggaccctcactctattcaatgtcacaagaaatgacgcaagagcctatgtatgtggaatccagaactcagtgagtgcaaaccgcagtgacccagtcaccctggatgtcctctatgggccggacacccccatcatttcccccccagactcgtcttacctttcgggagcgaacctcaacctctcctgccactcggcctctaacccatccccgcagtattcttggcgtatcaatgggataccgcagcaacacacacaagttctctttatcgccaaaatcacgccaaataataacgggacctatgcctgttttgtctctaacttggctactggccgcaataattccatagtcaagagcatcacagtctctgcatctggaacttctcctggtctctcagctggggccactgtcggcatcatgattggagtgctggttggggttgctctgatatagcagccctggtgtagtttcttcatttcaggaagactgacagttgttttgcttcttccttaaagcatttgcaacagctacagtctaaaattgcttctttaccaaggatatttacagaaaagactctgaccagagatcgagaccatcctagccaacatcgtgaaaccccatctctactaaaaatacaaaaatgagctgggcttggtggcgcgcacctgtagtcccagttactcgggaggctgaggcaggagaatcgcttgaacccgggaggtggagattgcagtgagcccagatcgcaccactgcactccagtctggcaacagagcaagactccatctcaaaaagaaaagaaaagaagactctgacctgtactcttgaatacaagtttctgataccactgcactgtctgagaatttccaaaactttaatgaactaactgacagcttcatgaaactgtccaccaagatcaagcagagaaaataattaatttcatgggactaaatgaactaatgaggattgctgattctttaaatgtcttgtttcccagatttcaggaaactttttttcttttaagctatccactcttacagcaatttgataaaatatacttttgtgaacaaaaattgagacatttacattttctccctatgtggtcgctccagacttgggaaactattcatgaatatttatattgtatggtaatatagttattgcacaagttcaataaaaatctgctctttgtataacagaaaaa

SEQ ID NO: 341 - protein, 702 aa, Homo sapiens
MESPSAPPHRWCIPWQRLLLTASLLTFWNPPTTAKLTIESTPFNVAEGKEVLLLVHNLPQHLFGYSWYKGERVDGNRQIIGYVIGTQQATPGPAYSGREIIYPNASLLIQNIIQNDTGFYTLHVIKSDLVNEEATGQFRVYPELPKPSISSNNSKPVEDKDAVAFTCEPETQDATYLWWVNNQSLPVSPRLQLSNGNRTLTLFNVTRNDTASYKCETQNPVSARRSDSVILNVLYGPDAPTISPLNTSYRSGENLNLSCHAASNPPAQYSWFVNGTFQQSTQELFIPNITVNNSGSYTCQAHNSDTGLNRTTVTTITVYAEPPKPFITSNNSNPVEDEDAVALTCEPEIQNTTYLWWVNNQSLPVSPRLQLSNDNRTLTLLSVTRNDVGPYECGIQNELSVDHSDPVILNVLYGPDDPTISPSYTYYRPGVNLSLSCHAASNPPAQYSWLIDGNIQQHTQELFISNITEKNSGLYTCQANNSASGHSRTTVKTITVSAELPKPSISSNNSKPVEDKDAVAFTCEPEAQNTTYLWWVNGQSLPVSPRLQLSNGNRTLTLFNVTRNDARAYVCGIQNSVSANRSDPVTLDVLYGPDTPIISPPDSSYLSGANLNLSCHSASNPSPQYSWRINGIPQQHTQVLFIAKITPNNNGTYACFVSNLATGRNNSIVKSITVSASGTSPGLSAGATVGIMIGVLVGVALI

SEQ ID NO: 342 - DNA, 832 bp, Homo sapiens
  misc_feature (1)..(832): n = unknown
agttaaaacaattttttaagagaaaggagataaccagagcatagccagcagaaggactcgcatgaggtttggtgggactgcctagggagaaggaggcagctggctgcgtgacagagcccagtgataggggagggcctgtgaccccttaaggagctgagacgctgtcacagagcaatgggagcgctgagtgatggagctggatttgtgcttttagaaaagctttgttggctgctgttgggagaatggattggaagggggtgagactgcagtcagagactcccataaggaagctgttactgtaatcacaacaacagatgcctacactccttcccaagacttccctctctgatcttagaagcattgtcaaatctgggttcccagcctgccatggcaagctgcttgctacttgggagtgaaaagcccttgtggagctttttcttattcggtgactgctcataaagtgccttcacctcgcttgccttattagccagtcctgcctccaaattaccaccacttgctcctttcaggagtctcttccccctaaagtccctattactccttctctctgctttcagatcagaaacagaaaaagtcaccttccctaagagtctgctccagtccagtagaaatgctttaaaatttttctggcctcanctgcccttcttgagcacagaaatttctagaatattgaatgaatcactggttctttataatcattttgtccagtttcaatcactgcattttaggaaagatttgaaaaactgaaggacaaagtggggcctttaaaggacttangattctttcagangaaagtatctaangaacaagttaa

SEQ ID NO: 343 - protein, 33 aa, Homo sapiens
MPTLLPKTSLSDLRSIVKSGFPACHGKLLATWE

SEQ ID NO: 344 - DNA, 644 bp, Homo sapiens
aacttaggctaggtacgaggctgggtgtgctcctactggccgctcgaagcttgaagctgcagttcactttcgcgaatgtaaggaacccagcttctgtgtggtgggcactgagagcagaaccgcattgagtcggagtggagcacagaagtgtaggtccttttgcgctgtttcaagctaaacccgtgtcactgatgccgtacagaagttacagaatgggacgccaccccaaacattacgtcatccgctgaccatttccttgcggtcttcccaccgtctaaatcgccatataatctgatggatggggtcctcgcgcggttcagctcctgggcgacagcgtaacccgtcgctcctccctctgcgggagggcgtggacggggcacgggatttggagcgtggaaggaatcgggaccgaaaggagtcccaggacaccggaaccaggactccccggcgcacccggagagtttccgagctcctttgaagtatgaatcagaacttctggatgggaatcctggagccaccacttgccctatggtcgcaatgggcaagtcgctcaacctcccagatcctgttttctcatgagtaaaacggggattataatacccacctgacaatattatctttgtgagaattaaatgagttagaat

SEQ ID NO: 345 - protein, 59 aa, Homo sapiens
MGSSRGSAPGRQRNPSLLPLREGVDGARDLERGRNRDRKESQDTGTRTPRRTRRVSELL

SEQ ID NO: 346 - DNA, 2373 bp, Homo sapiens
cacctggcgcacctgtccttttttcttctatttttcagaaccctgggcggaaagcgcgagcgagttgggcagatgccggcggccgcggtgcaggaagcggtcggcgtgtgctcctacgggatgcagctcagctgggacatcaacgatccgcagatgcctcaggagctggccctctttgaccaattccgagagtggcctgacggctatgtgcgcttcatctacagcagcgatgagaagaaggcacagcgtcacctgagcggctgggccatgcgcaacaccaacaaccacaatggccacatcctcaagaagtcgtgcctgggtgtggtggtgtgtacacaggcctgcaccctgcccgacggttcccgcctgcagctgaggccggccatctgcgacaaggcacggctgaaacagcagaagaaggcatgccctaactgtcattctgctttggagttgattccttgtcgagggcacagcggataccccgtaaccaacttttggcggcttgatggcaacgcgatcttttttcaggccaagggagttcatgatcatccaagaccagagagcaaatcagagacagaagctagaagaagcgccatcaagagacaaatggcctctttctaccaaccccagaaaaagagaattcgagaatccgaggcagaagaaaatcaagacagcagtggtcatttcagcaacatacctcccttggaaaatccagaagactttgatatagttactgaaaccagcttccctattccagggcagccttgcccttccttcccaaagtctgatgtttacaaagctacctgtgacctagccacctttcaaggagacaaaatgccacccttccagaaatactcaagcccaagaatctatttgcctaggccaccttgcagctatgaattggcaaaccctggttatacaaattcaagcccatatcccaccctttataaggattccaccagtatccctaatgacacagactgggttcatctgaacacactacaatgtaatgtcaattcatacagcagctatgagagaagctttgatttcaccaacaaacagcatggctggaaaccagctcttggaaaacccagccttgtggaaaggactaaccatgggcagtttcaggccatggccactcgcccttattataacccagagcttccctgcaggtacctcacgactccaccaccaggtgcccctgccctacaaaccgtgatcaccaccaccactaaagtgtcctaccaggcctaccagccccctgctatgaaatacagtgacagtgtgcgagaggtgaagagcctttcgagctgtaactatgctcctgaagatactgggatgtctgtctatccagaaccctggggtcctccggtgacagtcaccagggcagcctctccttcagggccacctcctatgaaaattgcaggagattgccgggccatcagacccactgtggctattccccacgagccagtttcctctaggacagatgaagcagagacttgggatgtgtgtctgtctgggctgggctccgcagtcagttactcagacagagtgggtcccttctttacctacaacaatgaggatttttgaaagacaatccaggggacataatagcagtgtgcatgcaggcaggaggcagggaaatgtgaaatggcaatgatctcttattgagttgggagattcaccttgtgtgcaaagaaacacagatagtagtaaaaattctgagtaactgagaaaataatcagttggaaatgattagataatatgggaaatttcacacagcattttgaaactggctacaatacatagaagtagtgaggaaagtgtgagtctctcaaatgaacaaataagcaaactgtaggaggttaaatactgacctaagttcacttagcttattagcaggagtagaagtcaaggattctggttcttattctaggacttttcccattagagcaccttagggaatttcacatccctagaggctgccaaaatagcttcaggaagaaatttttacaatcttatcacctgagtcatttcatgaaatttttgtttagcatttagaacctgttaaactagcttcaggaagtaattttgattgttttatctccaacgtgtgtatctacagcttttcaaaaaatctctagcaatggtaaagttcagttgtttttaaaagattcaatattagcttttcataacatgatagtttcctaaccttttcataaccttttcataacatgatagtttccataacagagacagcctaacaatgatgagttgtatttaatggattaccattgtactaaatacattttttttctgattaggtttcagaattataattaaaatgttttgcttaaaaaaaaaaaaaaa

SEQ ID NO: 347 - protein, 506 aa, Homo sapiens
MPAAAVQEAVGVCSYGMQLSWDINDPQMPQELALFDQFREWPDGYVRFIYSSDEKKAQRHLSGWAMRNTNNHNGHILKKSCLGVVVCTQACTLPDGSRLQLRPAICDKARLKQQKKACPNCHSALELIPCRGHSGYPVTNFWRLDGNAIFFQAKGVHDHPRPESKSETEARRSAIKRQMASFYQPQKKRIRESEAEENQDSSGHFSNIPPLENPEDFDIVTETSFPIPGQPCPSFPKSDVYKATCDLATFQGDKMPPFQKYSSPRIYLPRPPCSYELANPGYTNSSPYPTLYKDSTSIPNDTDWVHLNTLQCNVNSYSSYERSFDFTNKQHGWKPALGKPSLVERTNHGQFQAMATRPYYNPELPCRYLTTPPPGAPALQTVITTTTKVSYQAYQPPAMKYSDSVREVKSLSSCNYAPEDTGMSVYPEPWGPPVTVTRAASPSGPPPMKIAGDCRAIRPTVAIPHEPVSSRTDEAETWDVCLSGLGSAVSYSDRVGPFFTYNNEDF

SEQ ID NO: 348 - DNA, 428 bp, Homo sapiens
ttttttgcatatgctttctctattcacaactagaaagaacataaactccttaagggtaggggccgtcttatccttctttgaatcatgtgcaggtgcttaataaataagtgattgatcctgctcctaccactcctaccaccaagtcccttatttggtctcctggttaactggggaaagggaggatcctttaactttttaccactgtccttactatttctgagttctcttatctataatctgtcttatgtcctatagcacaaatcactttatatattgctttcccctcagcaaactcctacttttcattctgagtttcaacttcagtttatgccataatctaagccacttccctgctcttctctttaaccagactcatcttcttataacctgctagaacacaggcttctgagaacaggaatcaccatcag

SEQ ID NO: 349 - protein, 42 aa, Homo sapiens
MSYSTNHFIYCFPLSKLLLFILSFNFSLCHNLSHFPALLFNQ

SEQ ID NO: 350 - DNA, 1875 bp, Homo sapiens
caggccagagtcccagctgtcctggactctgctgtggggaagggctgatgcaggtgtggagtcaaatgtgggtgcctcctgcagccgggtgccaggaggggtggaggggccaccctgggctttgtccgggagcctggtcttcccgtccttgggctgacaggtgctgctgcctctgagccctccctgctaagagctgtgtgctgggtaaggctggtggccctttgggctccctgtccaggatttgtgctctggagggtagggcttgctgggctggggactggaggggaacgtggagctccttctgcctcctttcctgccccatgacagcaggcagatcccaggagagaagagctcaggagatgggaagaggatctgtccaggggttagacctcaagggtgacttggagttctttacggcacccatgctttctttgaggagttttgtgtttgtgggtgtggggtcggggctcacctcctcccacatccctgcccagaggtgggcagagtgggggcagtgccttgctccccctgctcgctctctgctgacctccggctccctgtgctgccccaggaccatgaatggcacctacaacacctgtggctccagcgacctcacctggcccccagcgatcaagctgggcttctacgcctacttgggcgtcctgctggtgctaggcctgctgctcaacagcctggcgctctgggtgttctgctgccgcatgcagcagtggacggagacccgcatctacatgaccaacctggcggtggccgacctctgcctgctgtgcaccttgcccttcgtgctgcactccctgcgagacacctcagacacgccgctgtgccagctctcccagggcatctacctgaccaacaggtacatgagcatcagcctggtcacggccatcgccgtggaccgctatgtggccgtgcggcacccgctgcgtgcccgcgggctgcggtcccccaggcaggctgcggccgtgtgcgcggtcctctgggtgctggtcatcggctccctggtggctcgctggctcctggggattcaggagggcggcttctgcttcaggagcacccggcacaatttcaactccatggcgttcccgctgctgggattctacctgcccctggccgtggtggtcttctgctccctgaaggtggtgactgccctggcccagaggccacccaccgacgtggggcaggcagaggccacccgcaaggctgcccgcatggtctgggccaacctcctggtgttcgtggtctgcttcctgcccctgcacgtggggctgacagtgcgcctcgcagtgggctggaacgcctgtgccctcctggagacgatccgtcgcgccctgtacataaccagcaagctctcagatgccaactgctgcctggacgccatctgctactactacatggccaaggagttccaggaggcgtctgcactggccgtggctcccagtgctaaggcccacaaaagccaggactctctgtgcgtgaccctcgcctaagaggcgtgctgtgggcgctgtgggccaggtctcgggggctccgggaggtgctgcctgccaggggaagctggaaccagtagcaaggagcccgggatcagccctgaactcactgtgtattctcttggagccttgggtgggcagggacggcccaggtacctgctctcttgggaagagagagggacagggacaagggcaagaggactgaggccagagcaaggccaatgtcagagacccccgggatggggcctcacacttgccacccccagaaccagctcacctggccagagtgggttcctgctggccagggtgcagccttgatgacacctgccgctgcccctcggggctggaataaaactccccacccagagtc

SEQ ID NO: 351 - protein, 309 aa, Homo sapiens
MNGTYNTCGSSDLTWPPAIKLGFYAYLGVLLVLGLLLNSLALWVFCCRMQQWTETRIYMTNLAVADLCLLCTLPFVLHSLRDTSDTPLCQLSQGIYLTNRYMSISLVTAIAVDRYVAVRHPLRARGLRSPRQAAAVCAVLWVLVIGSLVARWLLGIQEGGFCFRSTRHNFNSMAFPLLGFYLPLAVVVFCSLKVVTALAQRPPTDVGQAEATRKAARMVWANLLVFVVCFLPLHVGLTVRLAVGWNACALLETIRRALYITSKLSDANCCLDAICYYYMAKEFQEASALAVAPSAKAHKSQDSLCVTLA

SEQ ID NO: 352 - DNA, 1803 bp, Homo sapiens
atgacagcggctccggcgtctccgcagcagatcagggaccggctgctgcaggccatcgacccccagagcaacatccggaacatggtggcggtgctggaagtcatctccagcctggagaaataccctattaccaaagaggcacttgaggaaacacgacttgggaagctcatcaacgacgtccgcaagaaaaccaagaacgaggagctcgccaagcgggccaagaagctgctgcggagctggcagaagctcatcgagccggcacaccagcatgaggcggcgctgcgggggctggcgggggccaccggctctgccaacgggggcgcacacaactgccggccggaggtgggggcggctggcccacccaggagcatccatgacctgaagagccgcaatgacctccagaggctgcccgggcagcggctggacaggctgggcagccgcaagcgccggggtgaccagcgtgacttcggccacccagggccgccacccaaggtctccaaagctagccacgaccccctggtccccaactcatcccccctccccaccaacgggatcagtgggagtccagagagcttcgccagctccctggatggcagtgggcatgcaggcccagagggcagccgcctggagcgtgacgagaatgacaagcacagtggcaagatccccgtcaacgccgtgcgaccgcacaccagctccccgggcctgggcaagccccctggaccctgcttgcagccaaaggcttcggtgctgcagcagctggacagggtggacgagactccggggcctccccatcccaagggaccccctcgctgctctttcagtcctcggaactcacggcatgagggctcctttgcccggcagcagagcttgtatgcacccaagggctccgtgcccagcccctcaccgcggccccaggcactcgatgccacacaggtgccgtcaccgcttccactggcacagccgtccacaccccccgtacggcggctcgagctgctgcccagtgcggaaagcccagtgtgctggcttgagcagcctgagagccaccagcggctggcggggccgggctgcaaggcagggctgtccccagccgagcccctcctgtcccgggcaggcttttccccagactcctccaaggcggacagtgatgctgcctcctcagggggctcggacagtaaaaagaagaagaggtaccgacctcgagactatacggttaacttggacgggcaggtggctgaggcgggcgtcaagcctgtccggttaaaagagcggaagctcacctttgaccccatgacgagacagatcaaacctctgacccagaaagagccagtgcgggcagacagccctgtgcacatggagcagcagtccaggacagagctggacaagcaggaggccaaggccagcctccagagccccttcgaacagacgaactggaaggagctgtcacgcaacgagatcatccagtcctacctgagccggcagagcagcctgctctcatcatcgggcgcgcagaccccaggggctcaccacttcatgtctgagtacctgaagcaggaggagagcacccggcaaggggccaggcagctgcatgtgctggtgcctcaaagcccgcccacggacctccctggtctgacccgggaggtcacacaggacgatctcgacagaatccaggccagccagtggccgggggtgaacgggtgtcaggacacacagggtaactggtatgactggacgcagtgcatatcgctcgatccgcacggcgacgacgggcgcttgaacattctgccttatgtctgcttggactga

SEQ ID NO: 353 - protein, 600 aa, Homo sapiens [sequence omitted]

SEQ ID NO: 354 - DNA, 1279 bp, Homo sapiens
tccaaaacccgaggtctcgctaaaatcatcatggattcacttggcgccgtcagcactcgacttgggtttgatcttttcaaagagctgaagaaaacaaatgatggcaacatcttcttttcccctgtgggcatcttgactgcaattggcatggtcctcctggggacccgaggagccaccgcttcccagttggaggaggtgtttcactctgaaaaagagacgaagagctcaagaataaaggctgaagaaaaagaggtgattgagaacacagaagcagtacatcaacaattccaaaagtttttgactgaaataagcaaactcactaatgattatgaactgaacataaccaacaggctgtttggagaaaaaacatacctcttccttcaaaaatacttagattatgttgaaaaatattatcatgcatctctggaacctgttgattttgtaaatgcagccgatgaaagtcgaaagaagattaattcctgggttgaaagcaaaacaaatgaaaaaatcaaggacttgttcccagatggctctattagtagctctaccaagctggtgctggtgaacatggtttattttaaagggcaatgggacagggagtttaagaaagaaaatactaaggaagagaaattttggatgaataagagcacaagtaaatctgtacagatgatgacacagagccattcctttagcttcactttcctggaggacttgcaggccaaaattctagggattccatataaaaacaacgacctaagcatgtttgtgcttctgcccaacgacatcgatggcctggagaagataatagataaaataagtcctgagaaattggtagagtggactagtccagggcatatggaagaaagaaaggtgaatctgcacttgccccggtttgaggtggaggacagttacgatctagaggcggtcctggctgccatggggatgggcgatgccttcagtgagcacaaagccgactactcgggaatgtcgtcaggctccgggttgtacgcccagaagttcctgcacagttcctttgtggcagtaactgaggaaggcaccgaggctgcagctgccaccggcataggctttactgtcacatccgccccaggtcatgaaaatgttcactgcaatcatcccttcctgttcttcatcaggcacaatgaatccaacagcatcctcttcttcggcagattttcttctccttaagatgatcgttgccatggcattgctgcttttagcaaaaaacaactaccagtggtactcatatgaatatgaaaat

SEQ ID NO: 355 - protein, 391 aa, Homo sapiens [sequence omitted]

SEQ ID NO: 356 - DNA, 213 bp, Homo sapiens
ttttatgtttaaaattctttggtgtttaatatagtaccaactcattctgaaaactggtaaacaaaggaaacaaaaccccaagtaattgtcttctttcctgggcaaatggttgatgagggaaaggttttatcttgttttatcttgttttcaagacaaggtcttgctctatcacccagattggagtacagtggcaaggtcatagatcactgcaac

SEQ ID NO: 357 - protein, 36 aa, Homo sapiens
MVDEGKVLSCFILFSRQGLALSPRLEYSGKVIDHCN

SEQ ID NO: 358 - DNA, 2356 bp, Homo sapiens
cctccgctcgccccgagagagacccggccatgcaggagccgctgctgggagccgagggcccggactacgacaccttccccgagaagccgcccccgtcgccaggggacagggcgcgggtcgggaccctgcagaacaaaagggtgttcctggccaccttcgccgcagtgctcggcaatttcagctttgggtatgccctggtctacacatcccctgtcatcccagccctggagcgctccttggatcctgacctgcatctgaccaaatcccaggcatcctggtttgggtccgtgttcaccctgggagcagcggccggaggcctgagtgccatgatcctcaacgacctcctgggccggaagctgagcatcatgttctcagctgtgccgtcggcggccggctatgcgctcatggcgggtgcgcacggcctctggatgctgctgctcggaaggacgctgacgggcttcgccggggggctcacagctgcctgcatcccggtgtacgtgtctgagattgctcccccaggcgttcgtggggctctgggggccacaccccagctcatggcagtgttcggatccctgtccctctacgcccttggcctcctgctgccgtggcgctggctggctgtggccggggaggcgcctgtgctcatcatgatcctgctgctcagcttcatgcccaactcgccgcgcttcctgctctctcggggcagggacgaagaggccctgcgggcgctggcctggctgcgtgggacggacgtcgatgtccactgggagttcgagcagatccaggacaacgtccggagacagagcagccgagtatcgtgggctgaggcacgggccccccacgtgtgccggcccatcaccgtggccttgctgatgcgcctcctgcagcagctgacgggcatcacgcccatcctggtctacctgcagtccatcttcgacagcaccgctgtcctgctgccccccaaggacgacgcagccatcgttggggccgtgcggctcctgtccgtgctgatcgccgccctcaccatggacctcgcaggccgcaaggtgctgctcttcgtctcagcggccatcatgtttgctgccaacctgactctggggctgtacatccactttggccccaggcctctgagccccaacagcactgcgggcctggaaagcgagtcctggggggacttggcgcagcccctggcagcacccgctggctacctcaccctggtgcccctgctggccaccatgctcttcatcatgggctacgccgtgggctggggtcccatcacctggctgctcatgtctgaggtcctgcccctgcgtgcccgtggcgtggcctcagggctctgcgtgctggccagctggctcaccgccttcgtcctcaccaagtccttcctgccagtggtgagcaccttcggcctccaggtgcctttcttcttcttcgcggccatctgcttggtgagcctggtgttcacaggctgctgtgtgcccgagaccaagggacggtccctggagcagatcgagtccttcttccgcacggggagaaggtccttcttgcgctaggtcaaggtccccgcctggagggggccaaacccccagtggctgggcctctgtgttggctacaaacctgcaccctgggaccaagaggcagcagtcatccctgccaccagccagagcacaggaagagcagtgtgatggggcctcagcagcgggtgcccctggctcgggacaggtagcactgctgtccagccacagccccagcccaggcagcccacagtgctgcacgtagccatgggccgcaggagtgcatacaaccctgcatccagggacacggccctgctgggtgacctcaggcctagtccctttcccttgcgtgaaggacacgccccacagaaggctacggggaggactgagaggacagggctggaggcagccaagtaacgtagtcatatcatcgcgctctgatctggtggcatctggctgtgcaaggaagacccggctttgccctcacaagtcttatgggcaccacagggaacatcctggacttaaaaagccagggcaggccgggcacagtggctcacgcctgtaatcccagcactttgggaggccaaagcaggtggattacccaaggccaggagttcaagaccagcctggccaacatggtgaaaccccgtctctactaaaaaatacaaaaaagctgggtgtggtggcacacacccgtagttccagctacttgggaggctgaggcagcattgcttgaacccgggaggtggaggctgcaatgagctgagatcatgccattgcactccagcctgggcaacgagagtgaaactccgtccccaccccctgccaaaaaaaaaaaaaaa

SEQ ID NO: 359 - protein, 507 aa, Homo sapiens
MQEPLLGAEGPDYDTFPEKPPPSPGDRARVGTLQNKRVFLATFAAVLGNFSFGYALVYTSPVIPALERSLDPDLHLTKSQASWFGSVFTLGAAAGGLSAMILNDLLGRKLSIMFSAVPSAAGYALMAGAHGLWMLLLGRTLTGFAGGLTAACIPVYVSEIAPPGVRGALGATPQLMAVFGSLSLYALGLLLPWRWLAVAGEAPVLIMILLLSFMPNSPRFLLSRGRDEEALRALAWLRGTDVDVHWEFEQIQDNVRRQSSRVSWAEARAPHVCRPITVALLMRLLQQLTGITPILVYLQSIFDSTAVLLPPKDDAAIVGAVRLLSVLIAALTMDLAGRKVLLFVSAAIMFAANLTLGLYIHFGPRPLSPNSTAGLESESWGDLAQPLAAPAGYLTLVPLLATMLFIMGYAVGWGPITWLLMSEVLPLRARGVASGLCVLASWLTAFVLTKSFLPVVSTFGLQVPFFFFAAICLVSLVFTGCCVPETKGRSLEQIESFFRTGRRSFLR

SEQ ID NO: 360 - DNA, 652 bp, Homo sapiens
cttcggttcgccgtttcagcttcccccctaccccaaccttcacccgattttttttgagctgaaaaaaaagtggaacgagggagccaatctttggtaactcgggttttctgtggtaggtgggttcaaaatctgagctgtagggagcgctagagatttcgtgccctttagccaagctgagggtatttgcaaaccctgaagatttccgtctccgagctttgggcttggtaagcgaagtttggagtcggtgcctaatcgtatatcatctaaaccttgaaaaggctttgacctttggccaatttgatttgttctttgaagaagtgtatacaatgtgtgggaaaataatatgtgagaggagagaagtaaatgtgttgatgttgtgattgtttatgtgatttaatttttaattttttttttttaggtcccacaaactgcaaggaaaagaaaaaccctcaacaggaattacctttatacctgatgcccccaacataatctctctccaagggaaacgtgtttttattgccttgcggctgtgtattctcgattctcccccttctctcttttgttgtgcattttttggatgtggtgagtgtcatcagttgctctctaggtttgacatagataattaagcaactacagcgtgatgcttttgagg

SEQ ID NO: 361 - protein, 18 aa, Homo sapiens
LRFAVSASPLPQPSPDFF

SEQ ID NO: 362 - DNA, 845 bp, Homo sapiens
ctcgatctgctgctcgtctcaggctcgtagttcgccttcaacatgccggaaccagcgaagtccgctcccgcgcccaagaagggctcgaagaaagccgtgactaaggcgcagaagaaggacggcaagaagcgcaagcgcagccgcaaggagagctactccgtatacgtgtacaaggtgctgaagcaggtccaccccgacaccggcatctcctctaaggccatgggaatcatgaactccttcgtcaacgacatcttcgaacgcatcgcgggtgaggcttcccgcctggcgcattacaacaagcgctcgaccatcacctccagggagatccagacggccgtgcgcctgctgctgcccggggagttggccaagcacgccgtgtccgagggcaccaaggccgtcaccaagtacaccagcgctaagtaaacttgccaaggagggactttctctggaatttcctgatatgaccaagaaagcttcttatcaaaagaagcacaattgccttcggttacctcattatctactgcagaaaagaagacgagaatgcaaccatacctagatggacttttccacaagctaaagctggcctcttgatctcattcagattccaaagagaatcatttacaagttaatttctgtctccttggtccattccttctctctaataatcatttactgttcctcaaagaattgtctacattacccatctcctcttttgcctctgagaaagagtatataagcttctgtaccccactggggggttggggtaatattctgtggtcctcagccctgtaccttaataaatttgtatgccttttctcttaaaaaaaaaaaaaaaaaaaaaaaaa

SEQ ID NO: 363 - protein, 126 aa, Homo sapiens
MPEPAKSAPAPKKGSKKAVTKAQKKDGKKRKRSRKESYSVYVYKVLKQVHPDTGISSKAMGIMNSFVNDIFERIAGEASRLAHYNKRSTITSREIQTAVRLLLPGELAKHAVSEGTKAVTKYTSAK

SEQ ID NO: 364 - DNA, 1032 bp, Homo sapiens
  misc_feature (937)..(937): n = unknown
gggggaggggaagggggaaggttaccaagtagatgtatcgcgagcctttaaatcctggatcgtgccgcgtggcctacgagaaaggtttaacaaaagattcagcattttactgataactttttattttatttctctctatgagcaaatgatggagctcgaagtagttattttcacttacatttgtaaaaggaaatattgtgatataactatattaatatttacagctgacttttcatctgcaggttacaaaacacttgaaatatataagttagtggaactttgcttgaggtaggtattaactctctttctcagacggaaactgaggcagaaaagtgttggttgctagggtcatattaagtcagtagcagcactagtaaggaatttgaccacgaggtcagtcgagtggtttttacctagttaatggaatacctagttaatatagttctaaaactactgtattggcaatcttgtgccaagaacctgatgacggaaaccacgaggtaactgggaaattcccaaattggcgcttaagaaaaatactacgagacttgagaatctcttaacgtaacttcctaagtgtgagatgaccaaattgactttcgggatattctggcgttaatttcccgtccgccctaaatgttgggccaaaattcacaagatacgttatatttagcaattttaacagcgccaataatatgcgggggggcgcaacctctggttaaaacttatacgtttcaacacacttgcttgcaccttagcgtcccactggctagctgcggacgacgcgggttttaaaaccccccagtgagattggggcgaggtctatgtttcccagccgttgttcgtctcacgctagcgcggtgccacgggttaacccctgtgggagagaacagcctgtacggaccacttgtgggctgaatagtggggattgcagccnttgggctgagtttagctgacccacttggcgtgtgcgcggtgcaaacaaacatggctcctcttgcgctgagttgtgctgtctctgctgtctatctc

SEQ ID NO: 365 - protein, 52 aa, Homo sapiens
MLGQNSQDTLYLAILTAPIICGGAQPLVKTYTFQHTCLHLSVPLASCGRRGF

SEQ ID NO: 366 - DNA, 4222 bp, Homo sapiens
ttgttaactttgtcaaagatcaggttgttgtaggtttttggctttatttctaggttctctactttgtttcatttgtctatgtgtctgtttctataccagtaccatgctgtttttgttactgtactcttctagtatagtttgaagttaggtagagtgacacttccagcttttttttttttttcttaaggttggcttggctatttgggctcttttttggttccatatgaactttaaaagtttttatttttctaattctctgaagaatgtcagtagttcaatgggaatagcattgaatctatgaattacttagggccatatgcccatattcatgatactgattcttcctctccatgagcatggaatatttctccatctgttttgtgtccactctgatttctctgagcagttgtttgtggttctccttgaagaggtccttcactttctttcttagctgtattcctaggtatttttttctctttgtagcaaatgtgaatgaaagttcattcatgatttgtctccctgcttgcctgttgtttgtgcatgggaatgctagctacttttgcacattgattttatatcctgagattttgctactgttgcttatcaccttaagaagctttgggcctgagacaatgaggttttctagatgtaggatcaggtcatctgcaaacaaagataatttgacttcctctctttctattagaatactctttatttcttcctctggcctgattttcctggccaaggcttctgatactatattgaatggtagtggtgaaagagggcattcttttcttgtgccagttttcaggtggaacgtttctagcttttgcacattcagtatgatattggctgtgggtttgttgtatatggctcttattattttcaggtatgtttcttcacttcctagtttattgagaattttaaacctgaaagaatgctgaattttattggatgctttttctgcatttattgagataatcatgtggtttttgtatttagttctctttatgtgatgagtcacatttattgatttgcatatgttgaatcaaccttgcatcctggggacaaagccaactccattgttgcggatgaactttttaatgtgctgctggatttgttttgccagtattttattgaggatttttgcacagtgtttaccaaagacattggcatgatgtgttgttgttgttgttgttgttgtagtatctatgttaggttttggtatctggatgatgctggcctgatagaatgagttagagagaacttctttgtcttcaattttttttggatggttttaggagaaaaggtaccatctcctctttgtacctctgctcaaattcagcttgcttggtaggctagtttttactgcctcagtttcagaacacattattgatctattcagggttcagtcttgtggagggtttattttgcaaggaaattgtctatttcttctagattttctggtttatgtgcatacatatgtttatagtgttctctgattgttgttcatatttccatgggatcagtgatgatatctcccttattatttctaattgtgtttggttctcctttcttttcttatttatttgcctagctagtgttccatctagtttattaatttttttcataaaaacagctcctggatttgttgacttttttttttggaagagttttcagtgtctctatctccctcagctctactttgatcttggttatttcttgttttctgctacctttctggttagttttcacttggttttctagttcttttcatcaagatgttaggctgttaattttagatcttctagtttctcttttttttcttcttgtggcagagtctcactctgtcacccaggctggagtacagtggcatgatctccgctcactgcaacctccacttctcagttttaagtgatttctgctgtctcagcttcctgagtagctgggattacagatgtgcatcacaaaaaccagctaatttttgaattttttttgtagaggtggggttttgttgtgtggtccagactggtcttgaacatctggccttaagtgatttgcctaccccagcctcccaaagtgctggaactacaggcatgagccaccacacccagccctttctatctttttgatgtggacattagtgctataaatttccctcttttcttggtttccagtgattattttattctatcttggtgagtcatcagggaaataatcttaaatttacaatcaacatatagtttaaatccatataattgtgtgagaagaaccctttgttatttgaaggtgatgtttgaaagattttctaacggtgccttttagttagtcttaaatttctaattgtagttaaaaacatgccattgtcatttctgacattttaagtatatggtttagaagtggttagtatagttctattgttttgcagtaggttttagataatttgtgtcttacaaaagtaaaagtgaatactcattacttatgaaagaagttagttagcttgccttaggtagatagcaagagaagagtccctggaaagtccctggtcagtgcctcatccctgcataacatataaagaagcctggaaaaaatcaagctgcagacactaacaagggaactagcatatgttgttgtgcttggggacatgcccgtggctgcacagatagaaaaacctctggcccatttggataaaaacttgtagaaacctccagctcactcagataaaggaacaagaacgacctagcatagaaatgcctttgtttggccaggcacggtggatcatgcctgtaattccaacaatgtcggaggcagctgtgggcggatcatctgaggtcgggagtttgagaccagcatgaccaagatggacaaactctgtctttactaaaaatacaaaactagccaggcatggtgctgcatgcctataatcccagctacttgggaggctgaggcaggagaatcgctagaacccaggaggcggaggtttctgtgagccgagatcgcaccattacactccaggctgggcaacaagagcaaaactgcaaaaaaaaataaaaataaataaaaaaagaaagtacatctcaaaaaaaagaaagacaagaaaaagaaaaaaaagaagcacttttgtctttgtacagtcagtgggctcccaggaaaatgttccttctctttttgttggcatgggcactgtgggatctggtgcattccggtcgacactctcgtttatttggactgtaagtctgacctctatgaataattacttcagaccctgagtgctcccgggccaagctccttggccaaactttcaccttagcttctgataagtcttgggccaagctaagcagcatctatcaatcatcccttcagctcctgattgatcccgggccaaaggcctgggccaagctgagccacacgtttttcaagacagcctgtgaactaggcacatatccttcccttcccagtccataaaaaccctggacccagcctcgtagagggcaccactttcagacacctatctctgctggcaaagagctttcttctcttgcttcttaaactttcactccaacctcacctttgtgttcacgctccttaatctccttagaggtagaacaaagaactctggatgttatctcagactacgagagactgttacatcttggtgcactgctgagactacgacacttggtttctttgagtttgactaaatattttacatgagtgtaattatacagctttcctttttgactgtcttattttacttaacagaatgttttgaagatttgtccttattgtagtacttttcaagatttccttatttttaaggctgaatgctatcccagtgattgtacgtgccctgtttgctgaatctactcatccttaagggtacatttgcttccaggtaacatgtttgtgagtaatactacaatgtgcatatatctattccatgttctgctttgtctgtttgggatatttttcatacactgattcagtaccttgtgtattcccttgcttttgttgtctcatccgttgatgctacgtcccccaaattattgccacgaccagttgtaatgaagcttcacccttctgtattgtgctaggaattttacagctataggttttacattatagtcttcattcattttttaaaattgacacatgtaattgtgcatattttggggaaacaattatatatatgtgttgtataacaataaaaatcagtacttct

SEQ ID NO: 367 - protein, 197 aa, Homo sapiens
MSMEYFSICFVSTLISLSSCLWFSLKRSFTFFLSCIPRYFFLFVANVNESSFMICLPACLLFVHGNASYFCTLILYPEILLLLLITLRSFGPETMRFSRCRIRSSANKDNLTSSLSIRILFISSSGLIFLAKASDTILNGSGERGHSFLVPVFRWNVSSFCTFSMILAVGLLYMALIIFRYVSSLPSLLRILNLKEC

SEQ ID NO: 368 - DNA, 2406 bp, Homo sapiens
agtttactctacatcatagcagagaaaatggacaaaacacagctgttttgcatgtaggagaatactaaccctgcacagattgtgatggtgatgtggaatatactaaagcctagaacgcacctcctctgcatgactaatatgttctgcacaagacatgaaggcacagacagcactgtctttcttcctcattctcataacatctctgagtggatctcaaggcatattccctttggctttcttcatttatgttcctatgaatgaacaaatcgtcattggaagacttgatgaagatataattctcccttcttcatttgagaggggatccgaagtcgtaatacactggaagtatcaagatagctataaggttcacagttactacaaaggcagtgaccatttggaaagccaagatcccagatatgcaaacaggacatcccttttctataatgagattcaaaatgggaatgcgtcgctatttttcagaagagtaagccttctggacgaaggaatttacacctgctatgtaggaacagcaattcaagtgattacaaacaaagtggtgctaaaggtgggagtttttctcacacccgtgatgaagtatgaaaagaggaacacaaacagcttcttaatatgcagcgtgttaagtgtttatcctcgtccaattatcacgtggaaaatggacaacacacctatctctgaaaacaacatggaagaaacagggtctttggattctttttctattaacagcccactgaatattacaggatcaaattcatcttatgaatgtacaattgaaaattcactgctgaagcaaacatggacagggcgctggacgatgaaagatggccttcataaaatgcaaagtgaacacgtttcactctcatgtcaacctgtaaatgattatttttcaccaaaccaagacttcaaagttacttggtccagaatgaaaagtgggactttctctgtcctggcttactatctgagctcctcacaaaatacaattatcaatgaatcccgattctcatggaacaaagagctgataaaccagagtgacttctctatgaatttgatggatcttaatctttcagacagtggggaatatttatgcaatatttcttcggatgaatatactttacttaccatccacacagtgcatgtagaaccgagccaagaaacagcttcccataacaaaggcttatggattttggtgccctctgcgattttggcagcttttctgctgatttggagcgtaaaatgttgcagagcccagctagaagccaggaggagcagacaccctgctgatggagcccaacaagaaagatgttgtgtccctcctggtgagcgctgtcccagtgcacccgataatggcgaagaaaatgtgcctctttcaggaaaagtataggaaatgagagaagactgtgacaactcatgacctgcatccttaatatccagtgacttcatctcccctttcttcaccacaattccaggcaatggcctgtcggaccagacaattctaccactgcaaagagttgtaaccattttctggtatcacatttatttttcaagacatacttttcaagacatcattcactgacccactacctgcattgagtataaatgcctggatgttaaggattccaatttaactttgaaaagaactgtctcattcatttacatttctgttacagtcagcccaggaggttacagtgagctctccactaagaatctggaagaaatgcatcactaggggttgattcccaatctgatcaactgataatgggtgagagagcaggtaagagccaaagtcaccttagtggaaaggttaaaaaccagagcctggaaaccaagatgattgatttgacaaggtattttagtctagttttatatgaacggttgtatcagggtaaccaactcgatttgggatgaatcttagggcaccaaagactaagacagtatctttaagattgctagggaaaagggccctatgtgtcaggcctctgagcccaagccaagcatcgcatcccctgtgatttgcacgtatacatccagatggcctaaagtaactgaagatccacaaaagaagtaaaaatagccttaactgatgacattccaccattgtgatttgttcctgccccaccctaactgatcaatgtactttgtaatctcccccacccttaagaaggtactttgtaatcttccccacccttaagaaggttctttgtaattctccccacccttgagaatgtactttgtgagatccaccctgcccacaaaacattgctcttaacttcaccgcctaacccaaaacctataagaactaatgataatccatcacccttcgctgactctcttttcggactcagcccacctgcacccaggtgaaataaacagctttattgctcaaaaaaa

SEQ ID NO: 369 - protein, 414 aa, Homo sapiens
MKAQTALSFFLILITSLSGSQGIFPLAFFIYVPMNEQIVIGRLDEDIILPSSFERGSEVVIHWKYQDSYKVHSYYKGSDHLESQDPRYANRTSLFYNEIQNGNASLFFRRVSLLDEGIYTCYVGTAIQVITNKVVLKVGVFLTPVMKYEKRNTNSFLICSVLSVYPRPIITWKMDNTPISENNMEETGSLDSFSINSPLNITGSNSSYECTIENSLLKQTWTGRWTMKDGLHKMQSEHVSLSCQPVNDYFSPNQDFKVTWSRMKSGTFSVLAYYLSSSQNTIINESRFSWNKELINQSDFSMNLMDLNLSDSGEYLCNISSDEYTLLTIHTVHVEPSQETASHNKGLWILVPSAILAAFLLIWSVKCCRAQLEARRSRHPADGAQQERCCVPPGERCPSAPDNGEENVPLSGKV

SEQ ID NO: 370 - DNA, 415 bp, Homo sapiens
tggtacgtcgtgataccagattagaaaaagaactaatagctatttttcatatatatttatatataaataattttatagtgtgtgtattatatatcatcaaaatatatttgataatattgtgtatgttattgtatatattatcttttatatataaacataaaatttacatacacaaattttattaaaatataaatatattcattgtgtatataaaatatagctattatatacagtatacaatttaatagctattacggtatgcaatattacatatactgtacaatttatattgtatatatgtataaataaaagacatacacatatatatatatcatgtgttacttaatgattgggtagtcacagaccgatccgagtagggccagatatacggatccctggggtgggtagtcacaga

SEQ ID NO: 371 - protein, 22 aa, Homo sapiens
LGSHRPIRVGPDIRIPGVGSHR

SEQ ID NO: 372 - DNA, 624 bp, Homo sapiens
tcgccgatatattaataattaattgctgtaactataaagctgaggaatttcagacatgacagacagcaaagaggacagaagggatcatgaaaagtttctggaaaaggcaagacctaaactggaacctggaagttaagcagaaccagggtgtggggagagaggaacacatcactcaagatggcacagcctgagcggccaggcaaatatttcatatgaatgtggccctgggttggtgacactatgagcaacatcagatttggggaagcaattaaaaaaaaaaaaaaaattccacaaaatggtttacagacgatcttgcctatacagctggcctaaaaagctaggcttagatttttaaaatctcattttctgaaaagagttgttatacctcagtgttgtggcgagaggaataaaagcctccccgcctcattcatgaggaacttcttagaagcacatgctctgggcaacatgccccgctagtctgagatttctcctaatgctgccagaaaccaacctagtacacgtctctggtcttccccaacatctcccacgttcaagctgctaccttcagtaccatttctccccatcttctacctttgagatatctacctgcaaggactaaacagg

SEQ ID NO: 373 - protein, 55 aa, Homo sapiens [sequence omitted]

SEQ ID NO: 374 - DNA, 440 bp, Homo sapiens
  misc_feature (162)..(162): n = unknown
catttgaagtaaaaatctttaatttgaacttatttaatagattattttaatttttgaacaagcataaaggtgccaatttaattatctgtgggatttaaaaacttcaacagagaaagaaaataggaggtactagtgagaaatatattttacagtctacatatntattgtataataagctatattatattctaataacagcaaatataacattataatgattttgatatctggactcgctagacttggtcccataaatcctatagttcttaacaaaaaaacccatccgttagcaaacttacacatctaagctcagtttaatgcaacttaatgagacattgaattttatgcagctaacccaagttatctatagtgtgtgccctcctgagtaccccaggaaatagaagtaaagaactgacgaacatcagatccaactggcccat

SEQ ID NO: 375 - protein, 30 aa, Homo sapiens
MILISGLARLGPINPIVLNKKTHPLANLHI

SEQ ID NO: 376 - DNA, 348 bp, Homo sapiens
  misc_feature (315)..(315): n = unknown
ttttttttttttttttggggcaggggattctgctgcggaccctgagtcttaggaaggaggcttataacagcggaaagccatttttttttaagaattgctgagttttccggattggactttcaaagactttccctgaaactttgcgtggcatgggggttgcagaaactggtgtctacacattacaaaagtgtactgtttacacctatttgtgatgcacccatcgtgtttttctccatggaccacctattaagcttcctgctggagcgctcttggcccccttcctgctttctgggccacatcctgttgtaaatcggngctacttgtggggttttgtttgtgaattgggga

SEQ ID NO: 377 - protein, 32 aa, Homo sapiens [sequence omitted]

SEQ ID NO: 378 - DNA, 2629 bp, Homo sapiens
gtggagctggtggccagcaccaagaacacttttcaaagtcaggagaaacttataaaggaaatggactatttatgggaaatcaatcaagagacaagaaacaatctaaatcaggaaactagcacatttcattcgttaaaggactatgtgtcagtaaggaagaggataatcactattcaatatcaaaagatgcctatatttctcgatgaggaggagcaacggcatctgcaggcactggaaagagaagcagaagagcttttccaacaactacaagacagtcaagtgagaatgacccaacatttagaaaggatgaaagacatgtacagagagctgtgggagacatgccacatgcctgacgtggtgctgctccaggatgtgagaaatgtatcagcaaggactgatttggcacagatgcaaaagccccagccagtgaacccagagctcacttcatggtgcataactggagtcctagacatgctcaacaacttcagagtggatagtgctctgagcacggaaatgattccttgctatataagcctttctgaggatgtgagatatgtgatatttggagatgaccatctcagtgctcccacggatccccagggagtggacagctttgctgtgtggggagcgcaagcattcacctccggcaagcattactgggaggtggatgtgaccctctcctccaactggattctgggagtctgtcaagattccaggactgcagatgccaatttcgttattgattctgatgaaagattttttttaatttcctcaaagaggagcaatcactatagtctctccaccaactctccacctttaattcagtatgtgcaaaggcctctgggtcgggttggggtgtttctggattatgataatggatctgtgagtttttttgatgtttctaaaggttctcttatctatggttttcctccttcctccttctcgtcccctctgaggcctttcttttgctttggttgtacatgaaaagttggtttcatgatgatttattgtgacctcccatatataaggcaaatactgtcctaagacactatgtgtgagagcctgtgagcgcactgtaacttcatggaatgtgattactttatggttataaatgggataaccaccttgaatgtatacattcattaattaagttattttaattaataaattattgtggaatctttactagaacatcaataatggctttttttgtacaagttttttgagattcattcacttactgtgaaagtcatgttctaatgtatttaattcagagattgttagtatatcacacttgagcagccatcagagctctcttctgcctgggcacttttatcacttccagaagaatcccaataccccttaacatttattctgcattcaccctcccccattccttcagaacacttaatctactttttatgtttttgcattcgggtaaataaaatcatacaacataagttctttttttaatctgatttatttttcagagagtatgttttcagtttgtgcacactgtaaaccatttgtcttacttgtatatttgaaccaggctggggtagaaaaatgaactggtggatatctcatcttacaaagaataaagaagtgtgcttattttctttctaagtctgaccaagttaagttgacctcacagactttattatttctcaacatcctagttattaatctcatttcagctcatacaaaagtttttcagtgctgggttgctctgctattacatcttctcaagtatattatatcagattataacattcagaaaactcttatacttattactaccagattgaaaagtccaagggggcaatggcagtatttgtcttctttgctaatatattaccattatcgaatgcgatttttagaatagattacacaataaataagatgaataaatggattaagtagaggagttagtatgtataaatattattctaacattgagaaacttttccaaaatgtacgtaacaaaataggatagaacatactaatgaatatctatcaaaagataagacataaattgattttcagattgatatcaaagataatactattatgttagggtttaaaataattgtagcataatttttatagggttgatttcaattgtcttaggttttttaatataaacctttgaaagatgaaggttcctatataagatgatggggtagaggagcaggacttagaatagtggagactggccttaaactgacatataaatttaattacttgctaagcataaagtggtataaaccttcctatgcagtagaaagaacaaaattagtttacactttaaataagaatccagatgggctgggcgcggtggctcacgcctgtaatcccagcactttgggaggccgaggcgggcggatcacaaggtcaggagatcgagaccatcttggctaacacggtgaaaccccgtctctactaaaaatacaaaaaaaattagccgggcgcggtggcgggcgcctgtagtcccagctactcgggaggctgaggcaggagaatggcgtgaacctgggaggcggggcttgcagtgagccaagattgtgccactgcaatccggcctgggctaaagagcgggactccgtctcaaaaaaaaaaaaaaaaaaaa

SEQ ID NO: 379 - protein, 307 aa, Homo sapiens
MDYLWEINQETRNNLNQETSTFHSLKDYVSVRKRIITIQYQKMPIFLDEEEQRHLQALEREAEELFQQLQDSQVRMTQHLERMKDMYRELWETCHMPDVVLLQDVRNVSARTDLAQMQKPQPVNPELTSWCITGVLDMLNNFRVDSALSTEMIPCYISLSEDVRYVIFGDDHLSAPTDPQGVDSFAVWGAQAFTSGKHYWEVDVTLSSNWILGVCQDSRTADANFVIDSDERFFLISSKRSNHYSLSTNSPPLIQYVQRPLGRVGVFLDYDNGSVSFFDVSKGSLIYGFPPSSFSSPLRPFFCFGCT

SEQ ID NO: 380 - DNA, 720 bp, Homo sapiens
tgggtcagacccacgcgtccggagcggtgtagagcgagcaggtctcagctcctcgtcatgtcatacggtcccttagacatgtaccggaacccggggccctcggggccccagctccgggacttcagcagcatcatccagacgtgcagcggcaacatccagcggatcagccaagccactgctcagataaagaatttgatgagccagctaggaactaagcaggactcaagcaagctacaggaaaatctgcaacagttacaacactccacaaatcagctcgccaaggaaacaaatgaattgctgaaagaattagggtccttgccccttcccttatctacttcagaacagcgccagcagagacttcagacggcacgcctcatgaatgacttctctgcagccttaaacaatttccaggctgtgcagagcaagggtatctgacacaggacacaggcgagtattgccacgagccaagagctggcatctccgtctctcctgcccgacagagcaggccccagagcaggagccagctgcgtctgattccgaccagcccatgcagcgagtcgccacccacgatgcccgcacccacggcaggcatccaccgcgcgccatcacctgcacccccgcaccccgcgccacctccactccaccccaacccgacccaaccccggcacacccccgcccaccctgccaggcctcgccccccccccgccccctcccccaccc

SEQ ID NO: 381 - DNA, 1175 bp, Homo sapiens
cccgctctcaggcactgctggagaaccgagaccgacttctttctctttaccctcattggcgcttctctcctgcagtccgcctctgggccctgccgcatttcttgagacttaaagtggcattctaaaggcaatttaaaaatcatgtcaagctcagttgaacagaaaaaagggcctacaagacagcgcaaatgtggcttttgtaagtcaaatagagacaaggaatgtggacagttactaatatctgaaaaccagaaggtggcagcgcaccataagtgcatgctcttttcatctgctttggtatcatcacactctgataatgaaagtcttggtggattttctattgaagatgtccaaaaggaaattaaaagaggcacgaagctgatgtgttctttgtgccattgtcctggagcaacaattggttgtgatgtgaaaacatgtcacaggacataccactaccactgtgcattgcatgataaagctcaaatacgagagaaaccttcacaaggaatttacatggcctattgccgaaaacacaagaaaactgcacataactccgaagcagctgatttagaagaaagttttaatgaacatgaactggagccctcatcacctaaaagtaaaaagaaaagtcgcaaaggaaggccaagaaaaactaattttaaagggctgtcagaagataccaggtccacatcctcccatggaacagatgaaatggaaagtagttcctatagagataggtctccacacagaagcagccctagtgacaccaggcctaaatgtggattttgccatgtaggggaggaagaaaatgaagcacgaggaaaactgcatatatttaatgccaagaaggcagctgcccattataagtgcatgttgttttcttctggcacagtccagctcacaacaacatcaagagcagaatttggagactttgatattaaaactgtacttcaggagattaaacgaggaaaaagaatggtctgtagtttttatatttgttatgcaacattacacttgatttgctgctttaaatttagagtacatcccaaatttatccagtcatcagaaaatttaaagtagttcgtatgttaaagcaaagtatatatttgacttatttgtaatataataaaggatgctgatgttacggaaaaaaaaaaaaaaaaaaaaaaaaaaaa

SEQ ID NO: 382 - protein, 125 aa, Homo sapiens
MSYGPLDMYRNPGPSGPQLRDFSSIIQTCSGNIQRISQATAQIKNLMSQLGTKQDSSKLQENLQQLQHSTNQLAKETNELLKELGSLPLPLSTSEQRQQRLQTARLMNDFSAALNNFQAVQSKGI

SEQ ID NO: 383 - protein, 312 aa, Homo sapiens
MSSSVEQKKGPTRQRKCGFCKSNRDKECGQLLISENQKVAAHHKCMLFSSALVSSHSDNESLGGFSIEDVQKEIKRGTKLMCSLCHCPGATIGCDVKTCHRTYHYHCALHDKAQIREKPSQGIYMAYCRKHKKTAHNSEAADLEESFNEHELEPSSPKSKKKSRKGRPRKTNFKGLSEDTRSTSSHGTDEMESSSYRDRSPHRSSPSDTRPKCGFCHVGEEENEARGKLHIFNAKKAAAHYKCMLFSSGTVQLTTTSRAEFGDFDIKTVLQEIKRGKRMVCSFYICYATLHLICCFKFRVHPKFIQSSENLK

SEQ ID NO: 384 - DNA, 589 bp, Homo sapiens
  misc_feature (1)..(589): n = unknown
gagaatgggtagatatgattgaggatgcagcccatgagactgttcccattatgctggtaggaaacaaggctgacattcgtgacactgctgctacagagggacaaaaatgtgtcccagggcactttggagagaaactggccatgacgtatggggcattattctgtgaaacaagtgccaaagatggttctaacatagtggaggctgttctgcaccttgctcgagaagtgaaaaagagaactgacaaggatgacagcagatccattaccaatctaaccgggaccaattccaaaaagtcaccacagatgaagaattgttgcaatggctaaatcccaaacatccttggcctgtgaagtcttcatttccagaatactgaatttgtgtgacttatttgggctttaacagagtgggcacatcctactgacactgtccttggggagtttacagtgcaggganacctgaacccggttctcaggtncctctggaactttgggtcttctttgttttgtctcagtgagtgnttgggcctctgntaaataggtngtctgtcttacaggtnttaaaggttanctgtaatgtttttaaatggtaa

SEQ ID NO: 385 - protein, 103 aa, Homo sapiens
MIEDAAHETVPIMLVGNKADIRDTAATEGQKCVPGHFGEKLAMTYGALFCETSAKDGSNIVEAVLHLAREVKKRTDKDDSRSITNLTGTNSKKSPQMKNCCNG

SEQ ID NO: 386 - DNA, 1101 bp, Homo sapiens
atttgaggaaccatgtctccatccccgaccgccctcttctgtcttgggctgtgtctggggcgtgtgccagcgcagagtggaccgctccccaagccctccctccaggctctgcccagctccctggtgcccctggagaagccagtgaccctccggtgccagggacctccgggcgtggacctgtaccgcctggagaagctgagttccagcaggtaccaggatcaggcagtcctcttcatcccggccatgaagagaagtctggctggacgctaccgctgctcctaccagaacggaagcctctggtccctgcccagcgaccagctggagctcgttgccacgggagtttttgccaaaccctcgctctcagcccagcccggcccggcggtgtcgtcaggaggggacgtaaccctacagtgtcagactcggtatggctttgaccaatttgctctgtacaaggaaggggaccctgcgccctacaagaatcccgagagatggtaccgggctagtttccccatcatcacggtgaccgccgcccacagcggaacctaccgatgctacagcttctccagcagggacccatacctgtggtcggcccccagcgaccccctggagcttgtggtcacaggaacctctgtgacccccagccggttaccaacagaaccaccttcctcggtagcagaattctcagaagccaccgctgaactgaccgtctcattcacaaacaaagtcttcacaactgagacttctaggagtatcaccaccagtccaaaggagtcagactctccagctggtcctgcccgccagtactacaccaagggcaacctggtccggatatgcctcggggctgtgatcctaataatcctggcggggtttctggcagaggactggcacagccggaggaagcgcctgcggcacaggggcagggctgtgcagaggccgcttccgcccctgccgcccctcccgcagacccggaaatcacacgggggtcaggatggaggccgacaggatgttcacagccgcgggttatgttcatgaccgctgaaccccaggcacggtcgtatccaagggagggatcatggcatgggaggcgactcaatcactagt

SEQ ID NO: 387 - protein, 339 aa, Homo sapiens
MSPSPTALFCLGLCLGRVPAQSGPLPKPSLQALPSSLVPLEKPVTLRCQGPPGVDLYRLEKLSSSRYQDQAVLFIPAMKRSLAGRYRCSYQNGSLWSLPSDQLELVATGVFAKPSLSAQPGPAVSSGGDVTLQCQTRYGFDQFALYKEGDPAPYKNPERWYRASFPIITVTAAHSGTYRCYSFSSRDPYLWSAPSDPLELVVTGTSVTPSRLPTEPPSSVAEFSEATAELTVSFTNKVFTTETSRSITTSPKESDSPAGPARQYYTKGNLVRICLGAVILIILAGFLAEDWHSRRKRLRHRGRAVQRPLPPLPPLPQTRKSHGGQDGGRQDVHSRGLCS

SEQ ID NO: 388 - DNA, 1226 bp, Homo sapiens
ggcacgaggcagggctggtttcatccctgtgctaggctttctgtgaggatgagcagcaccgggatagacaggaagggcgtcctggctaaccgggtagccgtggtcacggggtccaccagtgggatcggctttgccatcgcccgacgtctggcccgggacggggcccacgtggtcatcagcagccggaagcagcagaacgtggaccgggccatggccaagctgcagggggaggggctgagtgtggcgggcattgtgtgccacgtggggaaggctgaggaccgggagcagctggtggccaaggccctggagcactgtgggggcgtcgacttcctggtgtgcagcgcaggggtcaaccctctggtagggagcactctggggaccagtgagcagatctgggacaagatcctaagtgtgaacgtgaagtccccagccctgctgctgagccagttgctgccctacatggagaacaggaggggtgctgtcatcctggtctcttccattgcagcttataatccagtagtggcgctgggtgtctacaatgtcagcaagacagcgctgctgggtctcactagaacactggcattggagctggcccccaaggacatccgggtaaactgcgtggttccaggaattatcaaaactgacttcagcaaagtgtttcatgggaatgagtctctctggaagaacttcaaggaacatcatcagctgcagaggattggggagtcagaggactgtgcaggaatcgtgtccttcctgtgctctccagatgccagctacgtcaacggggagaacattgcggtggcaggctactccactcggctctgagaggagtgggggcggctgcgtagctgtggtcccaggcccaggagcctgagggggtgtctaggtgatcatttggatctggaggcagagtctgccattctgccagactagcaatttgggggcttactcatgctaggcttgaggaagaagaaaaacgcttcggcattctccttaggacttatctgcttgtagatttggctgatccaattaacatgtggggttcttggtgtgggtctggggagctgaaggattttatggagctggtgctttggaggaatcttaagggaaaggagtagaagctcaggcctttgaaggatttcagctcctcctctctgtaatttgtgctttaagcattttttttcctaaaataaactcaaatttatcctcaaaaaaaaaaaaaaaaa

SEQ ID NO: 389 - protein, 258 aa, Homo sapiens [sequence omitted]

SEQ ID NO: 390 - DNA, 605 bp, Homo sapiens
agcgaagactgaagtgtgacataaatacatcatctccacacaagtcccacaaactcaggtgtgtcacttgggggaaacaagtcgaacaaactcaggtgtgtcacttgggggaaaaatgaggcttttccagtccagagaggccacccccacccaacttgagaaaagaaaaatagctcagatcagtctgagctatgcgaaatgtatcaggcccagggagactgtacagtgaataggggacttcggtcacacgcctcctccacccatgcccgaggcagtggttcctgcacagctgccctccccattagcttcttgttcctggaatttgtgatacaataaacagtgcatagccaattaataccttctgttatctttttttctgagccagacctgcagataccttatgctgtttcaatgtaaattcttggtaacaatttaggaactctctcttctttgttccttaaaaatccacttgcagactgggtgcgttggctcatgcctataatcccagcactatgggaggccgaagtgggtggaggatcacttgaggccaggagtttgagaccagcctggacaatatagtgagacttcatctcttaaaaaaaaaa

SEQ ID NO: 391 - protein, 63 aa, Homo sapiens [sequence omitted]

SEQ ID NO: 392 - DNA, 297 bp, Homo sapiens
  misc_feature (219)..(294): n = unknown
tttttttttttttttttttttttttttttttttttttttttaaaaggaaacccccgtaatgatgtccgggttgagggataggaggaaaatgggggataggggttttaccctgagggggtttcccccggtgaatgaggggtttctgttgttaatggggggggggaccggcccccctctgctttgcgccacccttaaaagggactttaggccctagaccanaaccttgccccccccccccaagaaacgttccttcatcaagaaaacgggggtcccccccccaaaaccccccccctntcg

SEQ ID NO: 393 - protein, 51 aa, Homo sapiens
MMSGLRDRRKMGDRGFTLRGFPPVNEGFLLLMGGGTGPPLLCATLKRDFRP

SEQ ID NO: 394 - DNA, 263 bp, Homo sapiens
tcatctgaaggcatacatcatggtatccagcagagaagtgatgaccactgggtgtggtttaggtgatcctccagatgtgtgagcaattgtagctggccataagaagatttcctggctgcccataagctgccattttgtgaggcccttcagctaactatttctccactgcagcagtagatcagttcagaagaaaactgtacattcccagcaagaatgccaacagaaacaaatggttgctatttaaaataaatagtggttaaacg

SEQ ID NO: 395 - DNA, 738 bp, Homo sapiens
tttaattagatatctcttagaataatacaggtttttgtttaactccaatgcattatagacataagattattaacactttaaggaaaacataggagaatattcttccaaacttaggataaatgctaaaaacattgaccatacaagcaaagattaaattagcctatattaatcataataactgtttatcgcacatgtaccccttaacctaaaagatgaagaagaaaataaaaaataaaataaaatttgaagaaaatgttaaacaaaaatgaaaccataccagtactagaagaaaaatgggtgaattcctctttaacctaggcaaaggaaaggcttctctggctcccaatctggatttaattaatcctaaagttgtatagaatcacaaaatacctcaaatagccaaaacaatcctgagcaaagagaacaaagctggaggtatcacactaccagatgccaaaatatcctgcaaagctgtagtaaccaaaacagcattatactggcatacaaatagacatatagagcaatggaacagaatagcgaacacagaaattaatccaaatatctgtaaccaactgattttgacaaatgtgccaacaacactctttaggaaaaggatagtctctttaaaaaatggtgctgtgtaaactagatatccgtatgcaaaggctgaactagaaccgacctttcacctaagtaaaaatcatcaaatggtaagaactaatgtagacccaaatgcaa

SEQ ID NO: 396 - DNA, 2430 bp, Homo sapiens
cacacccgcactcctcccgggtttctgctctccgcccgtgtggagtggtgggggcctgggtgggaatgggcgtgtgccagcgcacgcgcgctccctggaaggagaagtctcagctagaacgagcggccctaggttttcggaagggaggatcagggatgtttgcgagcggctggaaccagacggtgccgatagaggaagcgggctccatggctgccctcctgctgctgcccctgctgctgttgctaccgctgctgctgctgaagctacacctctggccgcagttgcgctggcttccggcggacttggcctttgcggtgcgagctctgtgctgcaaaagggctcttcgagctcgcgccctggccgcggctgccgccgacccggaaggtcccgaggggggctgcagcctggcctggcgcctcgcggaactggcccagcagcgcgccgcgcacacctttctcattcacggctcgcggcgctttagctactcagaggcggagcgcgagagtaacagggctgcacgcgccttcctacgtgcgctaggctgggactggggacccgacggcggcgacagcggcgaggggagcgctggagaaggcgagcgggcagcgccgggagccggagatgcagcggccggaagcggcgcggagtttgccggaggggacggtgccgccagaggtggaggagccgccgcccctctgtcacctggagcaactgtggcgctgctcctccccgctggcccagagtttctgtggctctggttcgggctggccaaggccggcctgcgcactgcctttgtgcccaccgccctgcgccggggccccctgctgcactgcctccgcagctgcggcgcgcgcgcgctggtgctggcgccagagtttctggagtccctggagccggacctgcccgccctgagagccatggggctccacctgtgggctgcaggcccaggaacccaccctgctggaattagcgatttgctggctgaagtgtccgctgaagtggatgggccagtgccaggatacctctcttccccccagagcataacagacacgtgcctgtacatcttcacctctggcaccacgggcctccccaaggctgctcggatcagtcatctgaagatcctgcaatgccagggcttctatcagctgtgtggtgtccaccaggaagatgtgatctacctcgccctcccactctaccacatgtccggttccctgctgggcatcgtgggctgcatgggcattggggccacagtggtgctgaaatccaagttctcggctggtcagttctgggaagattgccagcagcacagggtgacggtgttccagtacattggggagctgtgccgataccttgtcaaccagcccccgagcaaggcagaacgtggccataaggtccggctggcagtgggcagcgggctgcgcccagatacctgggagcgttttgtgcggcgcttcgggcccctgcaggtgctggagacatatggactgacagagggcaacgtggccaccatcaactacacaggacagcggggcgctgtggggcgtgcttcctggctttacaagcatatcttccccttctccttgattcgctatgatgtcaccacaggagagccaattcgggacccccaggggcactgtatggccacatctccaggtgagccagggctgctggtggccccggtaagccagcagtccccattcctgggctatgctggcgggccagagctggcccaggggaagttgctaaaggatgtcttccggcctggggatgttttcttcaacactggggacctgctggtctgcgatgaccaaggttttctccgcttccatgatcgtactggagacaccttcaggtggaagggggagaatgtggccacaaccgaggtggcagaggtcttcgaggccctagattttcttcaggaggtgaacgtctatggagtcactgtgccagggcatgaaggcagggctggaatggcagccctagttctgcgtcccccccacgctttggaccttatgcagctctacacccacgtgtctgagaacttgccaccttatgcccggccccgattcctcaggctccaggagtctttggccaccacagagaccttcaaacagcagaaagttcggatggcaaatgagggcttcgaccccagcaccctgtctgacccactgtacgttctggaccaggctgtaggtgcctacctgcccctcacaactgcccggtacagcgccctcctggcaggaaaccttcgaatctgagaacttccacacctgaggcacctgagagaggaactctgtggggtgggggccgttgcaggtgtactgggctgtcagggatcttttctataccagaactgcggtcactattttgtaataaatgtggctggagctgatccagctgtctctgacctacaaaaaaaaaaaaaaaaaa

SEQ ID NO: 397 - protein, 730 aa, Homo sapiens
MGVCQRTRAPWKEKSQLERAALGFRKGGSGMFASGWNQTVPIEEAGSMAALLLLPLLLLLPLLLLKLHLWPQLRWLPADLAFAVRALCCKRALRARALAAAAADPEGPEGGCSLAWRLAELAQQRAAHTFLIHGSRRFSYSEAERESNRAARAFLRALGWDWGPDGGDSGEGSAGEGERAAPGAGDAAAGSGAEFAGGDGAARGGGAAAPLSPGATVALLLPAGPEFLWLWFGLAKAGLRTAFVPTALRRGPLLHCLRSCGARALVLAPEFLESLEPDLPALRAMGLHLWAAGPGTHPAGISDLLAEVSAEVDGPVPGYLSSPQSITDTCLYIFTSGTTGLPKAARISHLKILQCQGFYQLCGVHQEDVIYLALPLYHMSGSLLGIVGCMGIGATVVLKSKFSAGQFWEDCQQHRVTVFQYIGELCRYLVNQPPSKAERGHKVRLAVGSGLRPDTWERFVRRFGPLQVLETYGLTEGNVATINYTGQRGAVGRASWLYKHIFPFSLIRYDVTTGEPIRDPQGHCMATSPGEPGLLVAPVSQQSPFLGYAGGPELAQGKLLKDVFRPGDVFFNTGDLLVCDDQGFLRFHDRTGDTFRWKGENVATTEVAEVFEALDFLQEVNVYGVTVPGHEGRAGMAALVLRPPHALDLMQLYTHVSENLPPYARPRFLRLQESLATTETFKQQKVRMANEGFDPSTLSDPLYVLDQAVGAYLPLTTARYSALLAGNLRI

SEQ ID NO: 398 - DNA, 3274 bp, Homo sapiens
gtcatgcgtgccacgctctcctctacgcgccggaccctgggatgctcttcggccgcatcccgctgcgctacgccatactgatgcagatgcgcttcgatggacgcctgggcttccccggcggattcgtggacacgcaggacagaagcctagaggacgggctgaaccgcgagctgcgcgaggaactgggcgaagcggctgccgctttccgcgtggagcgcactgactaccgcagctcccacgtcgggtcagggccacgcgttgtggcccacttctatgccaagcgtctgacgctcgaggagctgttggctgtggaggccggcgcaacacgcgccaaggaccacgggctggaggtgctgggcctggtgcgagtgcccctgtataccctgcgggatggtgtaggaggcctgcctaccttcctggagaattcctttattggctctgcgcgggagcagttacttgaagctctccaggacttgggactgctgcagtctggctctatttcaggccttaagattccagctcatcactagaggcagccctccatggacccatgaaaactgagatgaggaccttggtactagggagggagggaaggacgtgggaatgttttcttattggatctgagagatgatacatgataccagatgaaaagaaggagaagtgtgtaccatatgttttgagcagaggaccctccaacttatggcatcaggggcaaaaagtcacagcttatcccaggcaccctggcaggttctcagagcctgcctcctccctgtttatatgcgtacagcctggtaacccccaggcatgcaaatatacaatctgtaacaacacacagcctgacaccttcccctggtcatgtccagtttaaccttgaagtggcatttgtcacactaccctggtccctgattgcaaggagcttctgaagcaagggtgaatccttcccacactcctccatggttgccctccaaggtctagcccagcctatttgttagggaggatagagaaacagagcaccccctgtgctttctgaaaatagacttgctcttgtcttgagtggtgaccaaagcagttggctcttaaaaggtgggagagcagcccaaccaatccccaatccttttcttctgaaactgagcaggaagggtaaggaagtggctaggtctccttggactgagcatggacatgagtcctgtgaggactggtgtctctcctctagagctttcatctttgggatgcctgagactccgagactatcagaagggaattgacccaccccagtctagcaccaccctgccttcacttcatctacataaaggtggtataaaaacatagactggaggaggtaatccatggagagagaaaaagaagagggctcaggacaaggccctgaggaggcccaatcctaaaagtttgggcagagggaaccaggcacgttaaagaagacagaaagcggactatgcagagtgcttgtgagggtttcactaaaacagaggcaaaactgtccattgaattcagtaacatgaagtgtttgatgactatgatggcagcagtttcaggaagggcggtatggaaggcaggctgtactggttgagtgaatggaaagttggggagtagaacgtgtgagaagttggccttcaaggggctcaggttaataatagagagctatggagtcaaggcatgtttaagatgggaggtagagcacgccaatattgatggcaacagtcaagatggtgtgatgagagagatgggaggggcacaaagaggaggacccctgaaggagcagagtccatgagaaagaaggagggatgggacctttgtaggaagagacacagtcctgcagcctcatatggctcaataaaacagaaaggggcaagtatagaagattaggatgtctaaattaatggggaaatgatgaaggagtttgaatctcttctttgtgaaatgaagtgagactatcagctagttgtgggtggagtgtgttctcagaaggtatgaagtagatgttttcctaggtgttggaaaacaggttgattaaggcaacagcagaagggcagggcaaggctgagctctgagatggtcagtttagagtaggatgctgggcactcaggtgtgtgtgtgttgagtggggctctgcacacacctgtcttcccctcatcaggattcaggagctgggatgggtacacttactgcagtgttggggttttgccagggaagtaaaaggagctgagagaaagatgggtcagttcagaagacatacacaggagaaattgtagtgatgaaatgtgcagtctaaggtttaatctgaccaagaaattggaattgaaaacaggaggtgactagggagggattaggaaattagaggtcttgacaagatagaaactccagcatggtgaggggttgggcagggaggtatatttgagccagacaggagtgctttggaaattgagaggtggagcaatctcaggtaaaggcaaaatagagggtatgacctggggttgctggccagagccagggaggagccttaagaagtgaaatctagggttggcgaggctggagggcagggtgagcctccacatgggtgctgaagcaagaaaccgacagatgttgaggagaatggtgtgacctaggagtcagcatccttggtgaacaagaggagtggccacaaggccagtggcacctgccagaggggaaagcaggcatgacaggatagcatctcccaggtgagagccttttgaggaagggagggtgggcagtggtctggaagcttgatgcagagcagtgtgggtcccactggcagcccttggtcttagaagaatgggagtacccagtgggggagcagctgtacaatgaggtagactcctagaggttaattatcatctcctaatcttaccctgacccttttgtcaaacgttatctagattaaacctcagtataggcaggctgcaggaaatggacattccagtggcccctggggttccagcctgtagcagcttcatctgtgctttgtgcacttggttctcagtcatctctgcaagggaccctgacgcctgggagatcagagccactgaccctttatggcactgctaacagaccccttccctcaggtaattctggatccagaactcattatgggatgtaatccaggtcaacactaataccacttggaaggttccgctctgtctcactctgcttgagtatcccactgatcagtctctcagcgcctgcctactgggcagctcatctgtccacttattcgtattaaatttgctttttattt

SEQ ID NO: 399 - protein, 162 aa, Homo sapiens
MLFGRIPLRYAILMQMRFDGRLGFPGGFVDTQDRSLEDGLNRELREELGEAAAAFRVERTDYRSSHVGSGPRVVAHFYAKRLTLEELLAVEAGATRAKDHGLEVLGLVRVPLYTLRDGVGGLPTFLENSFIGSAREQLLEALQDLGLLQSGSISGLKIPAHH

SEQ ID NO: 400 - DNA, 2480 bp, Homo sapiens
ggcacgaggggaagccctggggcgctgccgccgctttccttaaccacaaatcaggccggacaggagagggaggggtgggggacagtgggtgggcatttagactgccagcactttgctatctacagccggggctcccgagcggcagaaagttccggccactctctgccgcttgggttgggcgaagccaggaccgtgccgcgccaccgccaggatatggagctactgtcgccaccgctccgcgacgtagacctgacggcccccgacggctctctctgctcctttgccacaacggacgacttctatgacgacccgtgtttcgactccccggacctgcgcttcttcgaagacctggacccgcgcctgatgcacgtgggcgcgctcctgaaacccgaagagcactcgcacttccccgcggcggtgcacccggccccgggcgcacgtgaggacgagcatgtgcgcgcgcccagcgggcaccaccaggcgggccgctgcctactgtgggcctgcaaggcgtgcaagcgcaagaccaccaacgccgaccgccgcaaggccgccaccatgcgcgagcggcgccgcctgagcaaagtaaatgaggcctttgagacactcaagcgctgcacgtcgagcaatccaaaccagcggttgcccaaggtggagatcctgcgcaacgccatccgctatatcgagggcctgcaggctctgctgcgcgaccaggacgccgcgccccctggcgccgcagccgccttctatgcgccgggcccgctgcccccgggccgcggcggcgagcactacagcggcgactccgacgcgtccagcccgcgctccaactgctccgacggcatgatggactacagcggccccccgagcggcgcccggcggcggaactgctacgaaggcgcctactacaacgaggcgcccagcgaacccaggcccgggaagagtgcggcggtgtcgagcctagactgcctgtccagcatcgtggagcgcatctccaccgagagccctgcggcgcccgccctcctgctggcggacgtgccttctgagtcgcctccgcgcaggcaagaggctgccgcccccagcgagggagagagcagcggcgaccccacccagtcaccggacgccgccccgcagtgccctgcgggtgcgaaccccaacccgatataccaggtgctctgaggggatggtggccgcccacccgcccgagggatggtgcccctagggtccctcgcgcccaaaagattgaacttaaatgcccccctcccaacagcgctttaaaagcgacctctcttgaggtaggagaggcgggagaactgaagtttccgcccccgccccacagggcaaggacacagcgcggttttttccacgcagcacccttctcggagacccattgcgatggccgctccgtgttcctcggtgggccagagctgaaccttgaggggctaggttcagctttctcgcgccctcccccatgggggtgagaccctcgcagacctaagccctgccccgggatgcaccggttatttgggggggcgtgagacccagtgcactccggtcccaaatgtagcaggtgtaaccgtaacccacccccaacccgtttcccggttcaggaccactttttgtaatacttttgtaatctattcctgtaaataagagttgctttgccagagcaggagcccctggggctgtatttatctctgaggcatggtgtgtggtgctacagggaatttgtacgtttataccgcaggcgggcgagccgcgggcgctcgctcaggtgatcaaaataaaggcgctaatttataccgcaaaaaaaaaaaaaaaaaaaactcgaggccattttctcttaaacaaaacaaaactttctaagtacagtcattctctaggatttgggaagctccttgcacttggaacagggctcaggtgggtggagcagtaaggcactacccagagagcttgctgctgcggccctgtcctgcggcctcaaagttcttctttactatatataacgtgcggtcatacctttcttcgttgtggtggggatggaagagcagagggagcatggcccaggggtgttgaggccagcggtgagagccgtgttagccaagacatggaactgtgttctcaagggttatgtggggcgtgggctctccatagtgtgtatgaaaagcttgttgactctagcggctcagagaggactttgctgggtttctttctgtgaatatctccgtgctgaccatgctggaattggatgattctgcaattcgggacctactgcaggggtccgtttagtaacgtcttgtctgtgatctttgttcttgacctctagaccccaagatgtgaacagtgcacgtgttaatgtcatctttgctcatgtgttataagccccaagttgctgtatattttcacaagtatgtctacacactggtcatgattttgataataaataacgataaatcgaaaaaaaaaaaaaaaaaaaaaaaaaa

SEQ ID NO: 401 - protein, 320 aa, Homo sapiens
MELLSPPLRDVDLTAPDGSLCSFATTDDFYDDPCFDSPDLRFFEDLDPRLMHVGALLKPEEHSHFPAAVHPAPGAREDEHVRAPSGHHQAGRCLLWACKACKRKTTNADRRKAATMRERRRLSKVNEAFETLKRCTSSNPNQRLPKVEILRNAIRYIEGLQALLRDQDAAPPGAAAAFYAPGPLPPGRGGEHYSGDSDASSPRSNCSDGMMDYSGPPSGARRRNCYEGAYYNEAPSEPRPGKSAAVSSLDCLSSIVERISTESPAAPALLLADVPSESPPRRQEAAAPSEGESSGDPTQSPDAAPQCPAGANPNPIYQVL

SEQ ID NO: 402 - DNA, 2290 bp, Homo sapiens
gaattccctcttaactcttgaagtaaataaataatctttgctggcaggactatgctgaatctccttaggcactctctaattagatgtcctaggtcctcccaattcttagtccttttatacctgtttttctccttctcttattccatttagtttttcaattcatacaaaactgtatccaggccatcacctatcattctatacaacaaatgtttcttctaacatccccacaatatcaccccttaccacaagacctcccttcagcttaatctctcccactctaggttcccacgctgcccctaatcccgcttgaagcagccctgagaaacatcgcccattctctctccataccaccccccaaaaattttcgccaccccaacacttcaacactattttatttttcttattaatataagaaggcaggcatgtcaggcctctgagcccaagccaagccatcgcaacccctgtgacttgcacctatacgcccagatggcctgaagtaactgaagaatcacaaaagaagtgaatatgccttgccccaccttaactgatgacattccaccacaaaagaagtgtaaatggccggtccttgccttaactgatgacattaccttgtgaaagtcctcttcctggctcatcctggctcaaaaagcacccccactgagcaccttgagacccccactcctgcccgccagagaacaaaccccctttgactgtaattttcctttacctacccaaatcctataaaacggccccacccttatctcccttcactgactctcttttcggactcagcccgcctgcacccaggtgaaataaacagctttattgctcacacaaagcctgtttggtggtctcttcacacggacgcacatgaaatttagttgtatccataaggcatatggaggagactaattcctcttccaaagacatgtaccagagtcctggagaggctgagggctggaggtggaagaaaggctctgacaggggtcagaatctgttcaggaaacatagcaaatgcctgatacttttaattagagaaaggtttgaatctccacattcatatatttgcagtccagtgacctttcagtttttttatgcccaaagtgtcaagcatgttaatgttaccattgactgcctccctgaaggtgcagctaccaggggaactgccaggacttcaaagcccacaaccaaaagccagaaaacactaccaagtacaagccccggacactggacccagagcacaccctgggcatctgctctgagatcctctccctggacagagacagctgctccttcagaaacagaggagaccctgaacacaggcaggcctcctgagcttccagccagggccacagccacatggttcagtgcctcccacactctcccagccttggctaccaggagggtggccagaactcagtggttgacagctgacagacagacgtgggcttccatatcgtccgtgccctgggctcagaccatcagtgagaaaaaacctggagggtctctctgggaaactcgttcttccccaccgactactgcagggaccgaggaagccatgaacactacaagccttttggcgcctgctgctgagataatggccacacctggcagcccatcccaggccagccctacctcgggagcattcacccatggcacacagactccgagtccaaccaaggcaacagcccccagatatccacaaacaggtgatctctctgcagagtggccattcactgctggtgaagagccagtcctggtcccaagaccccatcaagtttcaaggtgtcctcagccactcttcaaggtgggagctatggcagctgctcctctcaccctggctattcagaggctcaacccatgcctgatggagctgtgccaattcttccagcaatgcctctgcatgagccagaggagtcccaggacagaggacatgagatactgtcttgaatactattcctggtttctgaagaatgcaacatatatctgtcagagggtgaaaagggtgtcccactcgcacaccttaaagcaaaagtgccttgagaatatctgcaagtctgtgtgaggccttgaaaataacactagggcataacaattacttcaggggatacgccatccaccctggctcttgtcccaagtgggctacatttgaagaattcacccaggctccagctagatcatcagttaatttaaagtggttattcttggaagtagcattttttttccctctcctgtgaatctgtgcaaaacattgaaggtagaagttttcttgttaaaaaaaaaggaattc

SEQ ID NO: 403 - protein, 388 aa, Homo sapiens
MEETNSSSKDMYQSPGEAEGWRWKKGSDRGQNLFRKHSKCLILLIRERFESPHSYICSPVTFQFFYAQSVKHVNVTIDCLPEGAATRGTARTSKPTTKSQKTLPSTSPGHWTQSTPWASALRSSPWTETAAPSETEETLNTGRPPELPARATATWFSASHTLPALATRRVARTQWLTADRQTWASISSVPWAQTISEKKPGGSLWETRSSPPTTAGTEEAMNTTSLLAPAAEIMATPGSPSQASPTSGAFTHGTQTPSPTKATAPRYPQTGDLSAEWPFTAGEEPVLVPRPHQVSRCPQPLFKVGAMAAAPLTLAIQRLNPCLMELCQFFQQCLCMSQRSPRTEDMRYCLEYYSWFLKNATYICQRVKRVSHSHTLKQKCLENICKSV

SEQ ID NO: 404 - DNA, 546 bp, Homo sapiens
cttgttgccacggtggaagtgaatggtggcatcttgggttacttgaaacctccatatcttgggttaaggcagttttcttactaagcctctgtggagctgggactgcagggacaaacagccatgcccagttaattttttgtattttaatagagacagagtttcaccatgttgcccaagatggtcttgaactcctgagctcagtcaatccacctgcattagccttccaaagtgctaggattgcaggcgtgagccaccgtgcccagccagaatgtgttctcttaagtacagtcacggagtgtgatatgtagggtgtgcaaggcagcatgcagtgaggtggtggtggtgctagaattgaggaaagacaggtcacatttcattatgaaatgtgtcatcactttttgattaagattagggatttaatcctacagaaaatgcagcatccctggtgatagcagaagagctgttacttttagtgacatttgaaaaaccctacagaggaggaaagaacaggtgttaagtgttgaaatatgttaaggaagacaacct

SEQ ID NO: 405 - protein, 21 aa, Homo sapiens
MCHHFLIKIRDLILQKMQHPW

SEQ ID NO: 406 - DNA, 546 bp, Homo sapiens; identical to SEQ ID NO: 404

SEQ ID NO: 407 - protein, 21 aa, Homo sapiens
MCHHFLIKIRDLILQKMQHPW

SEQ ID NO: 408 - DNA, 1977 bp, Homo sapiens
aaaacctgtgggtgcctcagaccacagcagagctcacagaacctgcgggagccaggctgacccgccagcatggtagagttcgcgcccttgtttatgccgtgggagcgcaggctgcagacacttgctgtcctacagtttgtcttctccttcttggcactggccgagatctgcactgtgggcttcatagccctcctgtttacaagattctggctcctcactgtcctgtatgcggcctggtggtatctggaccgagacaagccacggcaggggggccggcacatccaggccatcaggtgctggactatatggaagtacatgaaggactatttccccatctcgctggtcaagactgctgagctggacccctctcggaactacattgcgggcttccacccccatggagtcctggcagtcggagcctttgccaacctgtgcactgagagcacaggcttctcttcgatcttccccggtatccgcccccatctgatgatgccgaccttgtggttccgggcccccttcttcagagattacatcatgtctgcagggttggtcacatcagaaaaggagagtgctgctcacattctgaacaggaagggtggcggaaacttgctgggcatcattgtagggggtgcccaggaggccctggatgccaggcctggatccttcacgctgttactgcggaaccgaaagggcttcgtcaggctcgccctgacacacgggtatcaagcctctgggaagagcactctgggttcagttggcaattggcaaggattttattttggtgggaagatggcagagacgaatgcagattctattttggtagagattttcagtccattcacaattaagattatattttggtgtcttatgcccaaatacctagaaaagtttccacaacggagactcagtgatctaagaaactaggtggcaatgaacatattccacaaagctggcatttgatctgagatctgtggtatctagaagagtgatatttggggtacatttcagagctgttctccctccttggggtgaggcatccttgagaaacatgagccagctgaggtgggagatatttttctaggaaaaacaatgcagatttttatatctgggaggactctctgaagcattctggtctacctctcatggtgcaactgggaagttgtggccctgcaagggacctgcccaaggtcagagaatggggctgtgaaggtctgggagataacccaggcctccacctccagcccaggtggctgacctctgctccatttcttggtcactgagtccctgcaggaagctaaagggcctttcagctcgtgccttctctggggcctcccacatgccctctttcctctatttgtctccagggcacccctggtgccaatcttctccttcggggagaatgacctatttgaccagattcccaactcttctggctcctggttacgctatatccagaatcggttgcagaagatcatgggcatctccctcccactctttcatggccgtggtgtcttccagtacagctttggtttaataccctaccgccggcccatcaccactgtgggtaagtccaggaccaggctgggagggaggaggccaaagggacagggcaggttgtgtgctgcaaggggacatggagatgagccagatttattcctgccctaatggggctcacattctagactgggaaacatacacatacaagcagatagaatagaagacagtctgggataggaactatagcagaggtgccaacagcaatagttgtgactaattgctgagcacctgctgtgtgccaggcactacactagctgccctacatgaagcaactcagcttatcctaacaatcttcatggcaggatttttttttaagagttttgctcttgtcgctcagcctggagtgcagtgagctgagattgcgccactgcactccagcctgggctacagagcgagactctacctcaaaaaaaaaaaaaa

SEQ ID NO: 409 - protein, 284 aa, Homo sapiens
MVEFAPLFMPWERRLQTLAVLQFVFSFLALAEICTVGFIALLFTRFWLLTVLYAAWWYLDRDKPRQGGRHIQAIRCWTIWKYMKDYFPISLVKTAELDPSRNYIAGFHPHGVLAVGAFANLCTESTGFSSIFPGIRPHLMMPTLWFRAPFFRDYIMSAGLVTSEKESAAHILNRKGGGNLLGIIVGGAQEALDARPGSFTLLLRNRKGFVRLALTHGYQASGKSTLGSVGNWQGFYFGGKMAETNADSILVEIFSPFTIKIIFWCLMPKYLEKFPQRRLSDLRN

SEQ ID NO: 410 - DNA, 1549 bp, Homo sapiens
gtgccctgtgagaccgccaagatggtggtgggcgcgttccctatggcgaagctgctatacttgggcatccggcaggtcagcaagccgcttgccaaccgtattaaggaggccgcccgccgaagcgagttcttcaagacctatatctgcctcccgccggctcaactgtatcactgggtggagatgcggaccaagatgcgcatcatgggcttccggggcacggtcatcaagccgctgaacgaggaggcggcagccgagctgggcgcagagctgctgggcgaagccaccatcttcatcgtgggcggcggctgcctagtgctggagtactggcgccaccaggcgcagcagcgccacaaggaggaggagcagcgtgctgcctggaacgcgctgcgggacgaggtgggccacctggcgctggcgctggaagcgctgcaggcgcaggtgcaggcggcgccgccacagggcgccctggaggaactgcgcacagagctgcaagaggtgcgcgcccagctctgcaatcccggccggtccgcttcccacgcagtgcctgcgtccaagaaataggagcttgctggatggaacctgaatttggacatggcctatgtacctaacgtggccttcttcccgcaccacccttgcctgcgctggcccagtggaaaccaccaggatcttgatgcaacttggcatttggttacccctgctgataagagcagccattacctgccactgggaccagcaggtgaagcgttgcaacatagccccctccatcatccttcacctcctatcccccactccaaaccaggacgacctgcaaggtcccagccagcaggacaccgtgggcactctggcaaatgaaaaaatggaacctggtcttgagctgaatcaatgtgttattgttacccccacccccggtttacctgatcagtgttaacctttactgggacactcatctgttacactggaacaccttcttctttttgtcaatcggcacagaccactgtaaggaaatgcagtgtgttgcagtggccttttctccccctcaccttctaaggtcagctctagctgagcatcagtgctctcttaaggaggaaaaaaacggtgcggctgggagcggtggctcacgcctgtaatcctagcaccttgggaggccgaggcgggcggatcacttgaggtcaggagttccagaccagcctggccaacaaggtgaaactccgtctctactaaaaatacaaaaattagccgggtgtggtggggtgcgcttgtaatcccagctactcgggaggctgaggcaggagaattgcttgaacccatgaggtggaggttgcggtgagccaagatggcaccattgcaccctagcctgggcaacagagcaagacaccgtcttaaaaccaaaagttaaccgggcgtggtggtgggtgcctgtaatcctagctacttgggaggctgaggcaggagaattgcttgaacttgggaggtggaggccaagattgtaccactgtattccagcccgggtgacagagcaagactgtgtctcaaaaaaaaaaaaaaaaaa

SEQ ID NO: 411 - protein, 179 aa, Homo sapiens
MVVGAFPMAKLLYLGIRQVSKPLANRIKEAARRSEFFKTYICLPPAQLYHWVEMRTKMRIMGFRGTVIKPLNEEAAAELGAELLGEATIFIVGGGCLVLEYWRHQAQQRHKEEEQRAAWNALRDEVGHLALALEALQAQVQAAPPQGALEELRTELQEVRAQLCNPGRSASHAVPASKK

SEQ ID NO: 412 - DNA, 626 bp, Homo sapiens
  misc_feature (29)..(29): n = unknown
tcgccctgtcgcccaggctggagtgcagnggcgcaatctcggctcactgcaagctccgcctcccgggttcacgccattctcctgcctcagcctcccaagtagctgggactacaggcgcccgccactacgcccggctaattttttgtatttttttagtagagacggggtttcaccgttttagccgggatggtctcgatctcctgacctcgtgatccacccgcctcggcctcccaaaatgctgggattacaggcgtgagccaccgcgcccggcctcttacatgttttttttaagctttaaaaaaaaaaatacatttgaaaatattttaaaaagcttatagaatgacataaagaaaatatttttgtacagctgtacaatgtgtgttttaagctaagtgttattacaagagttaaaaacttaaaaaacatttaaaaagtttaaaaagtaagttacagtgagctaactcattattgaagaagaaaatgttttttataaatttagtgtagcccaaatgttcataaattctacagtagtgtagaataatttcctaggcctccacattcactcaccactcactcactgactcatacagagcaacttccaacctctaagctccattcctggtaag

SEQ ID NO: 413 - protein, 69 aa, Homo sapiens
  MISC_FEATURE (9)..(9): X = unknown
ALSPRLECXGAISAHCKLRLPGSRHSPASASQVAGTTGARHYARLIFCIFLVETGFHRFSRDGLDLLTS

SEQ ID NO: 414 - DNA, 2329 bp, Homo sapiens
ggctgcggctgcagtggtggtggcgggtaccgcacggggtatggtccccgggtccgagggcccggcccgcgccgggagcgtggtggccgacgtggtgtttgtgattgagggtacggccaacctgggaccctacttcgaggggctccgcaagcactacctgctcccggccatcgagtattttaatggtggtcctcctgctgagacggacttcgggggagactatggggggacccagtacagcctcgtggtgttcaacacagtggactgcgctcccgagtcctacgtacaatgtcacgctcccaccagcagcgcctatgagtttgtcacctggctcgatggcattaagttcatgggcgggggtggtgagagctgcagcctcatcgcggaaggactcagcacagccttgcagctgtttgatgacttcaagaagatgcgcgagcagattggccagacgcaccgggtctgcctcctcatctgcaactcacccccatacttgttgcctgctgttgagagcaccacgtactctggatgcacaactgagaatcttgtgcagcagattggggagcgggggatccacttctccattgtgtctccccggaagctgcctgcgcttcggcttctgtttgagaaggcagcccccccggccttgctggagccgctgcagcctccgacagatgtgagccaggacccgaggcacatggtgctggttcggggactcgtgctgcctgttgggggtggctcagccctaggccccctccagtcaaagcagccagtccccctgcctcccgccgcaccctcaggtgccactctctcagcagccccccagcagcctctgccccccgtccccccgcagtaccaggttcccgggaacctgagtgcagctcaggtggccgcgcagaatgcagtggaggctgccaagaaccagaaggctgggctgggccctcgcttctcgcccatcacccctctccaacaagctgctcccggagtgggtccccccttcagccaggccccagctccccaactacccccaggaccccctggcgcccccaagccaccacctgcttcccagcccagtctggtctccactgtggcccctggctccggcctggctcccacggcacagcccggggcaccgtccatggcaggcactgtggccccaggaggggtgagcggcccttccccagcccagctgggagccccagccctcggtgggcagcagtcagtctccaataagcttctggcctggagcggggtcctggagtggcaagagaaacccaaacctgcctcagtggatgccaacaccaagctgacgcggtcactgccctgccaggtctacgtgaatcatggcgagaacctgaagacggagcagtggccccagaagctgatcatgcagctcatcccccagcagctgctgaccaccctgggccctttgttccggaactcaaggatggtccagttccatttcaccaacaaggacctggagtctctcaaaggcctctaccgcatcatgggcaacggcttcgcgggctgcgtgcacttcccccacacggcgccctgtgaggtgcgcgtgctcatgctcctgtactcgtccaagaagaagatcttcatgggcctcatcccctacgaccagagcggcttcgtcaacggcatccggcaggtcatcaccaaccacaagcaggtccagcagcagaagctggagcagcagcagcgaggaatggggggacagcaggcaccccccagggctggggcccattctggaggaccaagccaggccctcacagaatctgctccagctccgcccaccgcagccccagcctcagggtaccgtaggggcctctggggccacggggcagccccagccccaaggtactgcccagcccccgccaggtgcccctcaaggccctcctggagcagcttctggcccaccccctcctggacccatccttcggccccagaaccctggggccaaccctcagctgcgaagcctcctcctcaacccaccaccgccgcagactggggtgcccccaccccaggcctccctccaccacctgcccagtcctggcccgcacaacttccccctcgggctccactgccaggtaaggggacccgggggagggcagaggtctggactgagtgtcccagcagctcctgggctagagcaccaagaccaagtgctcctgggaagtaaagacataggatccaagaatgagggttcccccagccgggcctgcagcccagcgtcatggaggacgacatcctcatggatctcatctgaatccccaacacccaataaagttcctttttaacacaaaaaaaaaaaaaaaaaaaa

SEQ ID NO: 415 - protein, 715 aa, Homo sapiens
MVPGSEGPARAGSVVADVVFVIEGTANLGPYFEGLRKHYLLPAIEYFNGGPPAETDFGGDYGGTQYSLVVFNTVDCAPESYVQCHAPTSSAYEFVTWLDGIKFMGGGGESCSLIAEGLSTALQLFDDFKKMREQIGQTHRVCLLICNSPPYLLPAVESTTYSGCTTENLVQQIGERGIHFSIVSPRKLPALRLLFEKAAPPALLEPLQPPTDVSQDPRHMVLVRGLVLPVGGGSALGPLQSKQPVPLPPAAPSGATLSAAPQQPLPPVPPQYQVPGNLSAAQVAAQNAVEAAKNQKAGLGPRFSPITPLQQAAPGVGPPFSQAPAPQLPPGPPGAPKPPPASQPSLVSTVAPGSGLAPTAQPGAPSMAGTVAPGGVSGPSPAQLGAPALGGQQSVSNKLLAWSGVLEWQEKPKPASVDANTKLTRSLPCQVYVNHGENLKTEQWPQKLIMQLIPQQLLTTLGPLFRNSRMVQFHFTNKDLESLKGLYRIMGNGFAGCVHFPHTAPCEVRVLMLLYSSKKKIFMGLIPYDQSGFVNGIRQVITNHKQVQQQKLEQQQRGMGGQQAPPRAGAHSGGPSQALTESAPAPPTAAPASGYRRGLWGHGAAPAPRYCPAPARCPSRPSWSSFWPTPSWTHPSAPEPWGQPSAAKPPPQPTTAADWGAPTPGLPPPPAQSWPAQLPPRAPLPGKGTRGRAEVWTECPSSSWARAPRPSAPGK
